United States Patent Application Publication US 2022/0167576 A1 - sequence listing, part 3

SEQ ID NO: 30 - DNA, 35937250 bp, Oryza sativa (residues 4,227,913-6,341,868 of 35,937,250)
  misc_feature (5969519)..(5970518): n is a, c, g, or t
  misc_feature (13681864)..(13682863): n is a, c, g, or t
  misc_feature (13684155)..(13684254): n is a, c, g, or t
  misc_feature (18795366)..(18796365): n is a, c, g, or t
  misc_feature (24815509)..(24816508): n is a, c, g, or t
  misc_feature (35936251)..(35937250): n is a, c, g, or t
tatcacggttaacgcagtaaccgcatagttaccgtcaaatccatgaacttaacttaaaaaactgtaagatttcaaaaaccgaaaagattaccgcacgagataaccacgataaccatgtggtaaccacatgatcttataaacccacccacagtggcttgccctaggactgtcctagatgaaccgatgattcttcagagatacattaagtgtaacaatgataacgattggcatgcaacagggcaagagaccgatatgtgtacatgcaaagcaccaataaattgacatggggagaattaattaaccaagttaccctgccattgatcgatcgaattaacagtagtacgtacagccccccctcattagtttacactgtacgacgcgacgacaagactccccgtcttaatgaaatgatgatcccgatcgaattgggcgcgtaattaaatggcacgtacttgtgtggctatagtagcacatgtagctagagctaagctagcgtgcgtgcgttgcgttttgcatatgaaatcgaatcgacgccgtgtttagttcaaaatatttcttcaaacttacaacttttccatcacatcaaaactttcctacacatatgtaataccctgaaaattcgacaacaaaaatctaaactctaaaaatgcggattttcaaaaactttttaaataaattgcatcatgccgattttattcgattattttattggagtttgggttcggagtttataaatcgcgaataatggataattggttaagaataaaccctaaaaggtaaatggacaaagtaaataattaaagtgcaatttaaaataagatttggtgaggatagaaatgagtaaaatattattacgaccatatttatatccatcaaatttaaaagcaatggaatgagaattaactctaattaagttcaagtaaattacaataataatatataaaacatggaataaattaatctagaatgaatccatggattagaatggcacaaatattgagtatacttcatttatgcaaaatttgggaattaaagaatcaaatttaaataataaatgggccaacatcgggttaattagaaaacggcactgttcattgcacctaaagtgttcgacgaggtcccctagccctagcccctcctttgccgcgttgccctcgcgccccccgcgccgcgcgctgctccgcctcccctctgccgacgccgtcgccatcaccgcgcctggccgcccctaaccccgtgctgccgtcgccgtcgtttccgtcgcgtcgccgcgccgccgttccatcgccttgcgccgcgcaccgccgctaccgccgagccgtcgccgtcgtcgcctcgcgccccgtgccgcgccgctcccccgagccccgtgccgccgctgctaccgcgccgcgccacccgttccatcgccgcgcgccatcgccgttcggccgtcgcgtcgccgctgccgcgccatcgccatcgcgcgtcgcatcacctgccgcgccgcgccctcgagccccgtgccgtcgctgctgccgcgctgttgcttctcctcgcgccctgcgccctaccgcgccgcgtcgtcgtcacatcgccgcgtcgagccctgcgccgcgccaccccgccgacgccatgaggccaccgcccctctcccctcttccccattatctctctccccctcccttatataagcccccctactcccactcttccccttcatcctcacctcctctcctctaccacgccaccacgccgccgcctccacgccgcctcgccatcgcatagagcctccgcgccgccgccacgaagccgccgcgccgcgccacaccttgcgtcgacgtcgccaccgtcgccgtcgccgccgttgccgccaccgccgtcggtaagccgccgcctcctccacttgctcggccgccgtcgccgccccgggtagcagagagccgagagagagagagagagagagagggagaaaccgagggagagaaagaagaaggaaggaggagagaaaccgggagggagagggagaaggaaaaagaaaagaaaagggagagagagaaggaaaaagaaaagaaaagagagagagaaagaaaaaaaaagaaaaagaaaggaaggaaaaaagaaaaagaagggaagaaaaagaaaagggaaatagataggaaattagagggagattagggaagtttagaaaatttaaaataattagcatttggttatagactagttatagacgtagaattaagaaatttaatataaattatagattattctaggtaatttctacaggaaatcaattcgcggtagtagtttaaatgtaattaagaactaaacgattagatgaattcttatagactattatagattattttgggtaatctctataagtaattgattcacgttagaaattcggatttaatcactagaaattttagacgtatattatatttagtcgtttagtcctagacaaaaattaaatcgtataatattataagataattttaggattccgtccgatatttagcttgcgatagaaatttccaacctattatatggatataatgctcgggtagattaaattaaaaacttatgataacaaaatatttatacccgcaaaatagtttaggatataaaaatcgaaattgggtttgccctagttcgcgaatagtaaagttaatataaaagaatcgacttacgcgttcgacttccatttggatttatttggatttttatttgaattctaaccgaattcaaatcaattttcgcacgtaactatagagcccgagggagttgcggatccaagtgaaggccaagacccgcaagactttgagcaaggcaagtcatcactattccttgaacatgttgatcccaattgcgaaattgttttgtttacaaataaaattgcatgcaatgatgaacatcctacttgtgattatgccatgccttgattattgtttgccccttattccttcgtaaccatgtttacgtatgagtccctagtcaactatgaaaaatgcttagaaatgctattctagaatcatgcatactcatatttgtcaaatgctatatgcttgggcaattatctttgggaaggtaattgagatgcggcatgtggagacatgagcgccacattgccatgatattgaggacatgatttgtgaaaggagaaataaactaaataactgttttcgactggggcggacggaggatttgggtggtatctggaaaaggctagtaccgtccccggtcaattaaggaccgagccatgaagttaagcatgaaacgaccctcgtacaaccgtacttctcgtatgggtatagacctagcggagtagatagccgagcggaggcagtatccctgcatagatggttcacccctgagtgaggcaggtgcgctacggtgggatagccgttgaggtagggccgagaggcgtgccctacatcggtgtcgccattggtaggactgccatgagtgtgtgagagagagaacttaacttgagccataatttaatatgtgtgtgagacttctctttcccgggagcgccagaactcctctcactgctagaaacatggacgcctagagtgcatgagaatttaagttcatggagcgggtactgccaatgcgaggttatcaaaaggctttgccgtggcgcgtctcatgtgttgggacgaggctcatgtgttgggcagtcgcggagtgcgggtaaagtgtacatccactgcagtgtgagtaaaaccaaatctattcgaatagccatgctcgcggttattgagcaccgggacatgtattacacttggctagactctaaatcctttaacttgtgtgggatgggatattgcatgatgatttttatgctgatggagccacttcctgagaggcgggaatgtggacgtcctgagaaaaccataacgactcaatggtgggaagctatccttgggatcacaatggatggtggacagaaccgtcattgtttaatatgaacactggtattaaaacttgatcagtctatgctaggtcttaggcttgtgaaaagaattacaaaacttgctttgcgcaaaagaaccatagccatcctttgaattcctctgtcatgtgcatcattgctgtggtgtcttgctgagtacggttggtactcacccttgcaaatataaaattaatcaaaagcgggagatgaagcttcggaggatccctatgcctactactaggagggagatgaagacgatggcactcagtaggtcttagttacggtcgttgcctgtggcaatggcgtgccgctgctttaactccgctgccttacctacttctgtttttggaatgtattccgaaccgctcggtccgatgatttaagactgtgcctgcgggcttatgatgtaataattcgtactagactctcgtgtatgtgcacttgatatttcagctatgagttcgtgcgtaccagactacttgatctagggaaatgatactgtttacacgattgattcctgttataaaaacgggggtccacaacatataaccttcaaacttttccatcgcatcattccaatttcaatcaaactttcaattttgacgtgaactaaggctctgtttatttcacaccaaactttcccccaactcccaactttccattacatcacatcacatcacatccaaaattttcctacacacataaactcccaactttttttccaaactatcaacttttctaaacttctccccaattttagaaactaaacacagcctaaacacagctcgaatagggaagcataaacgcattgcaacttcactaccagggagagggaagctactgtgtgccaaaagctctcggtaacacagcgaaaaaacacgggaacagagcttcccgagagcagacactcagcggcctgacacctttaccgtgcaatatttcccgtgagactacgcttgtacactcggtatgacaagaaaaattaccgggtgaaagcactttctcggtaacaatgtattgtccggcacaggatgggttgcggaaacggaacgggggtgttaccgagaggtactaactcacgggaaggaataaaatgttaccgtgtgttgtagtcaaacacacggtaccgttagataacttaccgagagctattaacactaggtaatattgaatacgtgattctagaaatttcataaattcattatcgtacaacactgaaacgcagcaataggcaaacatgaaaagcagagcgcaaggatacatcacaggaacatgtcatgtggacattagctgcaaattctcccagtattaataggaacatcatggtacaataacaaaatattaatgaatctacaaactcactgcacatgatgcagtagaatatatgattctcaattcttacaacctctcccaatgaggcaatatatagacaaatgctagtggccgactaaccaaatgtgttcattgacatcacagatcaactctttagtgttttgccatgattgttatatgcctgaaattataaaaaaacatgtttagtgccaaataagattacaacacaactagattatttagaggtcactatttgtgggtagttcacaaaataaattttcatttgggacttgggaggcaggttacaacaattttgcattgtgatctccaactaagtgaagtgtgtaccttagaaatattcgtcaaacaagatatttctatggatgaattagaacagtaggattttgcagtcattgtcatcatgttgaacagatgattcattgagaattttcaagtccttgtcattgcaaatttcttcagtattcctgctaatggcaaccttctcaaaatcattgtcaagttcttgaccaaggcactgtttattatggaaatattgagtttcagaactaaagttatcaagtaattaattggtttgcattactattctagagtttcagaactgaagctagctagatttcctaatatgatatgaggatatgcatggtctacagccaccagtaggctaagcagtgacatttgtatcaagggacatgattatgcattgtccgcactcaatcaacaaaggattggaagtttgactaaaattggaagtttgaagaaaaaagttggaagtttatgtgtgaaggaaagtttcgatgtgatggaaaagttggaagtttgaagaaaaagttgggaactaaactaggccaaagtatatggatgtgaaatttaagatttcatctagaatgtaagcctctgatatgggtgaaaaataaactattcttttttttgtaataatatttttttagttgcaaattatctcaactgtgttcttttgatgacagagaaataataattgagtattaactaagaaataggatgagctagaattcagaacttcacttgtgataattgaagtacatatgtgcactaaagaacaagaaatttctaaccacaatttctaaacttggcgaccggggaaacacttaaccaaagattaagcaacagaaaataaaagtggaaaagaattacatccttctttgctgttaagaaaccagagttgtgcattctttctctttgctctgctcacatcaactccctgagccagtcggcaagcctcgcgactgctgccgccgcagcattcctgtgctgctagttgtgtcgctcagagcatctctcatataaattaaaattgcaggcacatagagaaatcagtacaacctgaaaaatgttgcgtccctccgggaggaaaggggatgcacggcaccagctgcagcctccaactggatggggcacgtcacggcgtcgtggatctagatgcagcatagcgcccattaggatgtcaccatattactagatccaaagagaaaatgaagtgtatttttccaaaatcaagaaccatatttgcataaagatgcaagaaccactcaacatacgcataccacacagattgggaggaagcagttgcagcaggcctcaatgcctagctcgatgatgattgggagccttgttgaacggatagacaatggcgtataaatcgcaatggatggacgtggacgtgcagggccgtgctcgccggccgtgtgaagggatgaggatagggacgcgcggtcgcatggctgggatggctgcctgcgacaaggccggcggagaggggaaatgtgaggaggcgatgagaggagagcgaggcggcggcggagggggagactggagaagagaagggggagcagttcaggggtagggttttgtggtgctatttgggccaactttttactggcccactcgaaaatttactgtgcagccaaaaatcgtggcgcgtcatccgctcgcgccaacggaaatcatcgggcgccaaagaaatttcacgcgccgtccaccccggccccgccaatggaaatttcacgcgtcgtaaaaaaaaaacacaccccgtgccaaaaaaaaacaccgcgcgccatccacctacgccaacggaaatcaccgcccgccaagcaaaaaaaaaatctgcgccaagccacggtagaaacggtgggtcccatggttaccgagcggtttggcatggcatagcgtatttttgtcttcccgagtttttttcgtcgctaacacacggtatgtttgcaatgttaccgggtgcaacgtgctactctcggtaagtcaccgagtactagcaaaaactcccggtaacagggtgaggcacacggcagcttcacaagctctggtagtgaattcgcaggcgttttgtgggcgtcggtatccatgcgtaaacgtacaagtgtacctcgcgcacattaattaactccttcgcatcgatcgacagcggcgtaatttcgtatcaaatacattaatgacgcagctacagatatgatccctagctaaagcaagatccacgtaatgtgcacgatatttagttagctgttgcatacttgcttctagctatgtagtcctctttaatttgaaaaataaataagaaaaagaacgatcgatcgagagcgtcagagcaagtgaatcgtctgtcattacctcttcaacttttagttcatcgtattaagcttttgattaaactcattggtgcttaattatataaaggattaaattgaatctatgctaaatatgtcattttagataaatgccattattatttatctatttatatccatgtcattagaataggattacgatcatcatcaccatcatattttccgtcctcatccccaatttcttcttctcctcctccctctctcccttccctcctgctagccggccataggccatagcagcgggctaacgccattgccaccccacacgtcggtgatggtgaggcgtgaggacgcggggaggccggccacagcagcggcgctgacgctatcgccgccccacacgccggtgaccgtgaggcgtggggacacgggaaggccggccatagcagtagtatgcctacgccatcgccccgtcattgcctacatagggagtcggtcgtgtggtggttgtccccgtcgccgtgaagtcggtgcaggagctggctcccactccctgtactgcaccgagatggccacgtgttggcagctggacggcgtagatgttctacgtgtgaattggagccagcacttgcgccaccgcgctggctgccacctccccattcgcctccctcatcagtgcccttctcgccgcccaccgcatctagctcaacgagatggggaagagaggagaggggacgatgaaggaagaaaattgaactgacatgtcggtcccacatctagagatattttggtctatatgatgacagaaaatatgatgtgatggtatgttctaattttgtacatatttaggaggcatggatacacatcgatgaatatagtaatgacatttattaaaaatggcaaatttataatggtataaattcaattaacccttatataaatgtaggcgatttaataggtatcagaaccaaatgtctcgaatttaaatcttgtcttaggttcaattaaataaaaagttgtaaacacttttattcaacgcttaagacatgagggggtaggatcgagttgtagcataagtgatctgagcattccacgaattctacaccactaaatttttatttatttattaaaaataaattagtttatggaaaaacatttagaaattacagtgcagaacacgattttaagtgaagaatacttagttttctcggtggagaaaaaagagctttcgtgcccaataagttgatacggttttcattattgttctcactttaaacctctgttttaatttctagaatgcacaatgcaaaattgaaattgggaaatatgtatatatcaaaacactctttacttgaaaataataaaaggattgttttggtggagattactgttacgactgaaacaagttcaattaattagtagcattaattaattttaaaaaccacaaacggctattaattattatgtgggttccttacttcatactcctactcaagctccctagctagctacatggagtaatagctaggtataggaatagcacttgtgaatactacacataggctgtgtttagttcaacgcaaagtttggattttggttgaaattagaaatgatgtgaccgaaaagttgtgtgtgtatgacagattgatgtgatgaaaaataactgaagtttagatccaaactttatatctaaacacacagccatataatagtgagcagcagctctaccacaatcctctgtcctctcctcccgtcgacatgcatactacgcatgtaacagtaaattggttaggcagtaattgcctgcccacacttaaataccctctttgtgctgtcaaatctttccccctctggaatttaggatactctccagtgaacagtaatgccattgcatgtgatgtttgtactgcacttgctgcacattgcatatcatcaaaatatttccaactatgtacctccctccactcccaaatacaagcatttctattatttaaattatatacacactatataagtacattgcatgaaatcgaattattttcagccaatcaagtgttaggagggactaatattaatgaggtgactggttctccttatcattaatctttgctaaccaaactagaaatatttatatttaggagttgtctggctggtagccacattttgttacagtttgtcatgcttatgggttagataagcttgatcaacttaagagttacttggttcagacgtagttgtggagagatttccttccaataaattagctaggtttcacgcgtcatgacttaaaaaaaagtgtggaaagattctctcagacttgataagttacgtgtgataaagattttgatcacctaatgctaagcaaatacgataacttttattgacaaatggtggtaatactcgtgttcatttctcctgaaaatgaagatgaagatgaagattaagttttttacgcaaaacgacgtaatattaacgtataattgattgagttttaattattacaaacttgaaaaatagattaatatgatattttagagcaactttcatatagaaagttttcgcacgaaacgtacctttagcagttcgaaaaacgtgccacgaaaatcttaatcttcatccaactcttgttggagaaaagaacaggaccgcaggtatgaatctagacatgtggtatgtccagattcgtaacactagaaaatgtctcatccgactctaggtttttatattttgggacggatggagtactttttttaaatgaagttttgcacacgatgtaaggagagaaacatacaggtgggagacatgatcattctcccctggttcacgcacgcggtgcatgcggcttgataagcatgcgtgatgcatatgcgccaacgatatactcccagatagctaccagttgatattgcagatcgagctagctgcagatttccctgctgctcgatcctctaatgatctcatcggaggcagtaggcagtgtggtcacactagacaattaatattgtgtggatcaaacagaagaaaaaactgttaatctgagtaaattaattaattttgcaaaactagctgtttgtatgttgtggacatatgaatctaggcgagtacaggaacgagtatatggtataaggtgaaaaccctaagctatatgtcgtcagtgacactagatctagacgatatggtcgaggcctagctcagctagctcttgaggatctttcagaagttgattcaatgcggcttatgactcatacaaattattataccatatcatattgagattatgatgtcttaatttcttctgagaggtcttgtattttatacttctagatgcccctgtcaaaaagaacttgagagataagctaggatacgaaccaagaagtttcatataagattagatagcgtttatatatcatttccaggatcactttcaatttttcccggactagccacctaatcaattaccatgctcataattttcatgtcttctaaaattagtcttaggtgcaacacccttaatgcttggtatctataatggatataatcaatattaacattatcggacatatatatgttgtattaccataccatatcatgcagagaattatagatacgtaccatattactgcttcttctttgctaagtagtaatactcccttcgtcccaaaatataacaacttctagcctctaacatttattctaaaggaaaaagtacgaattacccccctaaactatcgcggtcgtctgaattacccccccgaaccacaaaaccgggcattcttcaccctcaactatacaaaccggacaaattacccccctcgacccaatccgcggtggttttggtccacgtgacgtacgcgtggcagtccagtcagcactctatttataaaaaaatattgtaggacccacctgtcatctcctcatcctctctcttctctctctcactcttcctctctctcaaatgggacgacatgcggcggcgtgccggggaggacgcgggcacgcgctggcggtggacgggtggtggcggcggcgctggggaggacgcgacggcgggcgggcggcggcggacgcggcggcgggcgcggcggtggcggcgggccggggaggacgcggtggtggacgggcggtggcggcggcgccggggaggacacggcggcggcaggcggcgccgacgaggggggatgaggaggaggacgacgacgaggatgcagcgcacggcggcggcgggggagatgacgaggacgacgatgaggatggcgacgaaggtgcgtcgtccccgctgtgcccgttgtcccgacggcgccacacagagagagagagagggggggaggggggaagcagcgccgagcggccacctcctcatcccccgcccccggcgctccgccacctcctcggcaccgcccaccgccgccgcgtcctccccacgctccgcctctccgccatggccgccgcagccattgtcctcgttgttgtcctcgattgctccgtcgccatcctcgtcatccccctccgtcgctgcctccgcgtcacccgccgccgccgccgccgtgcgctccatccgcatcacccgccgccgcctccgcgtcctctccggcccgccgccgtgcgctccattcgcgtcacccgccgccgcctccgcgtcctccccggcccgccgccaccgcccgcccgcctccgcgtccgccgccgcccgcatccgccgccgcgtgctcgtgtcctccccctcacgctgccgcgcgtcctcccgtttgagagagaggaagagtgagagagagaagagagaggatgagaggatgaggagatgacaggtgggtcccacaatatttttttataaatagagtgctgacgagactgccacgcgtacgccacgtggaccaaaaccaccgcggattgggtcgaggggggtaatttgtccggtttgtatagttgagggtgaagaatgcccggttttatggttcgggggtaattcagacgaccatgatagttcggggggtaattcgtactttttcctatcctaaaatagtaacaacttattcccttctcaatcaatcacaatcatcacatatttaattacctaccttttaatttgatacccgtatctaaccctaaaacttttttatattttaattaggatgtcgataatacttctattgacactgtccatggtcgttgagagtgccctagcttgtaccaaagagacatgcatgattaattataattaatatgatataacaaaatttataattggcattaatgcactgacaaaattactgcatgtcgagttactggcctgtactgctcgtccaaacaggttctctaaggaaaccattggtctttatttagaggaacatccaatcatgtctatacccaaacttaatggagcgtttgtatagccgcgctgcagtgagaactgatccactcaccactcctttttcatataattcaaaagaaaaaaatattattttatctctactacttttaaaaacgaagtcatccgcttctttatgtatacgtacataattaaccacatacacatatgtaggatatagtattttattcttaatccactcacccaaacagtcccatgctttatcctcaatataatccaactatccatgcaattcccaattatataggatctgcctattctaaaacataggcatattactaatttatatatagagaaagacgcacacaccactatatatccacacacccatgaccatgagcgtggacacacacttaaacttaaggagacaaactctgattaaaagcatagtaacgtgcatatatctatgaacaccaagatttaaattcttgtggatggtattaattgtaatcgcgcctctgttgatgtgaactatatataatcttaaagtagaaaaaagttttacatgcaatggtgatatatatgtacaatgcagtggtgactggtgacatggcaatttccaaatgatgatgaaatgtacctgtatttgcttttgtggtatcttcttaattactgtttatatgaaatctcctttacgattcttgaggaggaggtaccgatcaataacttaggccaatactcctatttttttcatttcatttttgcaaagttggcgggctaagcgatcgagctttttgttggacatatatattcttggatgcgatcaaaatttaatgatagcaattatgtcaggagaagtactaggctatacacatttaagcgtgtactatcgattgacataactattccaatcttgtgcttctaatgcaaaaaatatgatagtgtgtgttgaaaattaaggctctatagtgtcttgttctctttataagtaaccgcacttgagaaatgaccaggggtcttccagctagcttcacaaggtggtgggctagacgatctgggttcaaaacctcaccccttctaattatttgatattaggtccttccctaatattctagtttttttataagtaaccgcacttgctatagctagtaccatgcagtcccctagcaattaatactagataagcagcgtgtctcaaaactcaacaagagaaaatatagagagatctcaacagcataggatgctcattcctgtagtatagattgcgagagactaaggttgagctcatcaagacacactacgtaccaaaaagcatagtctgttgtatatgctttttttaagtaaattctataagaccttagttttttctaaaacaaaacctacaaaatcttaggtattacgatcaaaatttcacaaaaccacaaggatatattttgacgtgcatgttgcatataaccataaagtattatggcttcatatagtttcattaaccaacttttgtttcattgatcatacaaatagtagtaatctaaattaactattttatattttattgcagtactaagataaatgcactaacacactatggttttaagaaaccttagaaccaaaatactcatggttatgtgacgcataccaaaactcacatgtggtttttaaactacaatacctacggtattatgaaattaactctttttagagttatggtttagggctccttaatttagaactcaagagaaataaatacgtaacagtcgaatatatcatgattttaaaatacagagaacactagaatcatgactaatactccctccgtattttaatgtataacgtcgttgacttttcgaccaacgtttgaccattcgttttatttaaaatttttatcatgcttaaagaacatttgatgataaatcaagtcacattaaaataaatgataattacataaattttttaaataagacgaatgatcaaacgttggtcgaaaagttaacggtgtcatatattaaaatatggagggagtattatatatcttggaggcttaagaacggtcatatataccaccaccgatgcgggggagctaattgtactcgatcgatcggctaattgataagaaaacaaaatcaggtaattaactaagtgtaaaacaaaataatacctagctatacactcagctgaaccaggccacaaggcaggcagaagttctccctggatgcatatgtctctcctcctgtatatatcgatcgtgtcctcccttcgtcttatattacccttcgtctcataatataaggaattttgagtttttatttacactttttatcactcgttttattcaaaaaattttaaaattattatttattttttttgacttgatttattatccaaagtactttaagcataacttttcgttttttatatttgtataaattttttttgataagacgagtgctaaaacggtgtaagcaaaaacttaaaatccggaacggagggagtacgttctagctaattaagctactctcactatcacacatcacggaagaataatccatatatccctctgaaaaaaactggctgcaggatcgatcgattagaggacaaaaaggccagccacctcggtctgggtgctcacgcttttcccgatcgatcagtactacgtgaattgaatgtgcattacctagctatactgcgtacagtactttctctgttgctcagtgtgcacactactatactgtttggacacacgcacacactgatcagacagtgtggccatggctagctgcataaacctctacttgagcagtactacctgtgtactcctcagataacgtttaggaatcttccaactaactttacaaggtggtgggctagatgatctggattcaaagtctcaccctttctaattatttgatattaaatcattccttaatattcgtgtcttttacttgtgtgctgctcgctccgtcctataaaataaaataaattttagaaaaaaatatcctaaaatataagggattttagaattccaagacaatattatattcttcaccggcctatcaaccttattcatcacctactaacttttctacttcatctgtttcataatgtaagactttctagcattgtccacatttatatagatgttaatgaatctagacataacatctatataaatgtgggcaatgctagaaagtcttacattatgaaacggagagagtattactttactctttcacccatcaccttttatcccatcacatgttcatttgtcactttcttaatttttacaaaagatagtagaggccctgtttagattccaacttttttcttcaaacttccaacttttccgtcacatcgaacttttctacatacacaaaattccaacttttctgtcacatcgttccaatttcttcaaacttacaaatttggcgtggaactaacacagccatattatgggatggagggagtacttcatataccaaaacggtatttgtgtgtcaaaaacggtatgcaactcaacaatacttaggacttatttggaatgtatttatttgtcaagctacaacctctaacctggatagcaactggaattaataaggcaaaaaaataattttaaggtatgagcttttattcttctactttgagcataagaaaagataaactttacagactacggtccttgagagatatcaaatttctttaatgtaaaacggtgttatgaaacaaggagtcagttgtcgcatgagagaataatgtttaatgaattaccggaatagggatgacgattaatcggaattatgcactggtggagaaatcatctttggtcggtcgaccaaaatccacaatagtcccggttgcaataaaaaccaggactaaaaatgatctttagtcccggttaaaaacaccacacctattttactaaaaatcatctttactcccggttcatcccgtgtcagtagtttgtcaggggggcgaggatctttagtcctggttggtgacatcaaccgggactaaagatcatatttatagtcccggttgataatactaaccgggactaaaaattatattgatctttagtcccggttagtattaccaaccgagactaaaatttaatacgtagtatataatctttatcccttattctctcttacacttcacagatccgttccccttcctattcacagatctaactcctcctcccctcctcacttcccatccgccccttctccccttcctcctcccctctcctcccctcctcacttcccatcccatccggtggccgacggcggcggcccggcggccggcggggctgtggcggcggcggccgtggcgggtggcggccatggcgggcggcggcgggctggcgggtggcggtgccgcgcggggcggcggccatggcagccggcgccagcgctcccggcgggcggccggaggtgccacgcgcggcggcgaccgtgtcctcccgactgccggccggcctcttttttttttctttttttttataatttgtgattgattgagacgtgtaattttgtgattcatgcaaatttcatggatatgagatgtataatctatgatgtatttgatttgtgtgtattttttaggatttgtgatgtatttgatttgagtgtattttttttaggatttgtgatgtatttgatttatgtttataagtaacttaagctttgggatgttactttgaattggggatttggggattgatttagggatatacatggcactatattcgggagaaaatatagagattaaatctgggcaaaagaaaaaaaaagcgctactctctctttagtcccggttggtgttatcaaccaggactagagattcctctcatttttcccggttggtaacaccaaccgggactaaagatcgatctttagtcccgggtatttgaaccgggactaaagatagtgatctttagtcccggattcgtactcccggttggaaaaccgggactataggggggttaccaatcgggagtaaaaaggctttctcaaccagtgatggggaaatttgttgtatccaaatatatgtacatgttttataatactatgcccttctttggatatttaaatgcatacaactatatgtaaatattttcatatatactatttttaattgaacaataaataacttgatactaacccaaaatgtagctttcaacacttgtaattgaagactagacacaccaggaaattcgataccttccagtacctcattaagagccataaaaacactgagtaaaaagaagactggttgatgtaaaaaccctatattaattgtaaaattaaagggaaaaaatccaaatattccccctaaattttggatggaattctatttgacacctgaactttaaaactagacatctaaccccttaaattttgtaatacagttcatgctaccttctaaggtggttttacataatggttttacgtatttgagatcttacatagttgtatttaaataagttcaatatatttacgtatcatcaattgtaggctgttaatttatatactatacaataatgttatagtattgctactctagtatttctctttgctactctagtatttctcttgcgagtaagagcaaacaaggggtaaaaagaaacatttaagtgaaaaatttacatatatgtttcaatgcatatttcgcatgatcaaagctcagccaaaacatatgctaatgagataacgactttgtaaaactaccttaaggatccgtatgaacagtactataaagtttagagaactgaatgtccggttcaaaacttcatgttgctagatggactttttttttttgagaattacacagtacagcgcagacactcacaacgcacgcgctctcacccctatgaacacacgcacacaaaccctacccctatgagcattttcgaagactgggccggtaaagtttagggaactgaatgtcccgttcaaaacttcatattgctaggtggacttttgatttcaattaaagtttaattaggtggttattaattaggacttctttttcaaatttaaaatttgatactgcttaaattacaaacccaacctaaaacaatcaaacaagcacagtagtacatgcactggcctctctctctctctctcctctgcctttttaagcagccacacgtcgagtcgtctcctccacacagatcgcacacaccagtagctgcactagcccactgtgatcactagctaccgagctgcactgcactgcacacaacttgttcgtcccgagtcccgaccaccactagctagctctcgcacgctcgccgcgcgccatgatgagcagcaggctgaacgccggcgcgatggcggtgccagcggcggcggtggcggccgacgtcgtcgacttcgggtacgccgcccccatgccgccgccctacgtcggcttcgacccagccggcatgggcggcgagcgccagctgttccagcacggcggtgcatgccatggcctctacgacggtggcctcgacttctccgccgccgcggcgttccaggaagcggccactcttggagttggcctgccgggcggcaatctgctgcagtccctggcgccgcccgccgccgccgccgccacgccgtcgtcgctgcagatgccgatgatgatgtcgctgccgggcctgcctgcgacggcggccgacgtgtacccgttcggcggcggcgggttcgtgaagcgggaggatggccccgtcctggacgtcgtcggcggcggcggcggcgggaggatcgggttgaacctcggccgccggacctacttctcccccgccgacgtcctcgccgtggaccgcctccttctccggtcgcgcctcggcgggatggggatggagatggggatgggcatgggcgtgctcgggctgggcctcgccgcggcggcgcaccaccaccagccgccgcggtgccaggccgagggctgcaaggccgacctctccgccgccaagcactaccaccgccgccacaaggtctgcgacttccacgccaaggccgccgccgtcctcgccgccggcaagcagcagcgcttctgccagcagtgcagcaggttagctccgatcccgcgcaaccatgtcgctgccaggtgggacccagcaggcacacgtgtcgctgccaggtgggacccagggcacagccacacacgcactcacacacttgacatatagctgattcaattccgtacgagatgaacactgcagcaaactgttgagatatgtttgcttgtcttttccgttgtctccttgccaaccacgcatctcactcactttccatgcatgcatggatatttctatttcatcaggatggatcactgtacattcaacctacttcatcccttctaaaatatactacctccgtcccaaaatataacttttagctataaatctggacacacagttatccaaattcatagctaaaaatacttatattttgagacggagagagtaaataattttatatggacgagacatttcctaatactacaaatttacgaatttagacagagagcatgttcacactcgtatattagggaataccccctccgtcctaaaagaaagtccaatcctaactataaacctagacacatatatgtccagattcgtagctagaagttggttttttatgggacggagtagtatgtcatattcatttaaaatctcttatattttgtaatgatggagtaattatataaatagctccccagatgatttgcatgcatgcaattgagcttaattatgatgaaaaacaacctgatcactagctagtggtagtgtatagctacctgcattattaattcatggccatgcaacagagaaaaagctttcttttcttcagttcttgcttttcttctctctgtactgtgagttcatcatgcatcaactgtaaaagaaaaaggctactagatgagatattttgatccaagagtttaatctgaggtcagatgctaattactagtattagatgatgcttgcatgcatgtcagtcagatcagatcagagagcacaaggcagtggttgcactttatcactgtagctatacctagcgctgcatgaccagtgtagcacactcatcattgcaactcatctgacgatccatggatggagatacatggcccctatatatatgtcccagtatatattactgtataggagtacagctgacagattgtacacctactagcccctacataagcagtctctgtatctgcatacattggcatatttacgtgtacatgcagtgcggatgcatatgtattacagttaatttacagtagtagcagtgtccattaagtctaatttggtactacatttatatattcagtttgatttaaatttgtgttcttaatttggacaggtttcatgtgcttgctgagtttgatgaggcgaagaggagctgccggaagaggctcaccgagcacaaccgccgccgccggaagcccaccgccggcggccaatcgtccaaggactcgccgccgccgccgccgtcgaagaaagggactgacgccagcatcgctagctcctacaccagctgtgaccaccacaagggtacgtactatactaaaatttaactcaattaattagtttggtcctcagaagggagaacacatttgaaataattcaaaatctaattaagtgtggcaatgctcaatatataatgctgaacgttagatcgatctgaaagcaaaattcagatactgatgttttcaaatttcaaactatgtacagactagattaatgctcttcttaaattaaccatttagatcagagaagaaaaatatacaaattaaagatgaactgaatctttttttctataactaaaacacagtcaataactcacctcagtttgtaaaagggaaaagtaccatcaggatctgttactcttcactgtttttgaccccaagcacaagccttgctattttttttcaaaaaaaaaaaaagaaagcccttgctaaattttttgttttttttttagaaaagctaggtcgttatataacgtctattcaccaacttgtctatataatggagtgctactacgtaccatagtccatagatacgatcttttgtgcaagaacgtggcaaatatatatacagacataacacatatgacttgacagttgtcacgcctagctagatgctacaaccacgtacaactagctgatcgatcatgcacacttcgcgccaaattaagctttcatgcacctactatagctaatactctagttagcaaagtacgcgtcttaaaataaaacaacctaagataatatggtatataacctaatataacaatctagatagaaaaatgttcatatttgttaaactagattatatttaggttgttttatttttggaacggagtgagtagtttacgtcgcaattcctgcattattctacatgtgatcatcatctctcttcgtgcagcagctgcgagcaccacgacggccagcggcgtgagctgcctgcaggagcttgcagaccaccacgacgtcggcggcggccatcaggcagccatggcggcggcgccgccgccgacgctgtccctggccgcgctgccgccgcaggaggaggacgacgaggacgaagacggcggcctcggcaacgtcctgatgatgcagcagcaccatcaacggcggcgactgcaacacgacggcgacggcgacgacgatgtcgccgccgccgccgcccaccaccatctgatgagatctctcgcgcggcagcagcagcagcatcgccatagcagcggctgcagcaacaacaacgacggcgacgacgacgaccacaacaacaacaacaacatactgtcgtgctcgtcggcgtcggaccagcagaacagcagcaacaacaacaacatgcatttcttcgaggtggatttcatctagtcgtctcgaaaccaaaaaaacatattaattcgtcagggtaaatatcctttggaattaattaccgatggttttttcgaaccgattcacgtgaaaatcctgtaaaattccaaaggagatctcgattggattgatatgtacgtgtacatctgtgtttttcagaaaatttagagattggtcgatgggaagtaacgagaaaagggagtagagataggctgctactgctggtttgactgcattattatgagacgatgagttgaaaagaaagcagctagctgctgttgctgctgcagctgcagttgctagctagtattagctaggttcgttgcatgcgatagctaggctggagtgagtgtgtagctaaagtttgctttttttttttcttttggggttttcttttcactgtgttaatttgtacttgctcttgctgcttgccctttttactagagagggggggggggggggggaatagtgtgcagctagcatgtgttttttctttgttcttttgcctttttggtgacaatatgtaaattatgttgctgtgcatcatgctccttacaacgaaacactagctctgtttgcatctcctcttgacttgttgtaacttgtaagatcttaattttaaatgtcgaataagttcatgattaattatctcccttgtctcgttgagtttttagaccattatgttgacagatctctgaacatgtccctggtctggaattctggaaatagctctttgagctccttaatttggtgattatggatcgctactgtctagctagctagctcccctaattagtcacagcaattaatgtcctgtccaaatgggagctgatcacttacaagtgacattgtctatacataatactccctctgtattttaatttaaattttaatgtatgacgccgtcgactttttaaccaacgtttgaccattcgttttattcaaaatttttatgtaaatataaaaatatttatgtcatgcttaaagaatatttgatgataaatcaagtcataataaaataaatgataatgacataatttttttaataagacgaatggtcaaacgtcgatcaaaaagtcaatgttgtcatacattaaaatacagagggagtatatataaaagacgatagtgatagtggtaatcagggtacaaaattattaaaaaccgcttgctttcatataaaatggagatttcgagctagctagagatcaaatggcttggtaaaccaatcatttttctttaaaaaacaaaccaaattttagtcgaatttcaccgttagtcaaaccattggtactatcaagagcggttatcgagggtggttctgtttagttagccgggtggtaccatccgacaacggaattttctatatatgcatatggagtatttgttttgcttgaaatatgttttgttcgacaattagatcgtttgtttgtatgtcttgtaataagatcatttgagcaatacaattgaaaactgtatgaaaaatttaaagtttatattttttttatatacttattctagttctagctagatgagaattaactatatataattaattgaaaatatagaacaaataactttatgtgccttgagctaggctgcaataagttgtactgatcactatctacggagaacctatttgagttgcgtcatatataaggcataacaaattttgaattttagaacttgatatgatttagggttttcttacgttggtttcgttgcttagccttgtcttttggaccgttaacactagaattgtaaaaagttcgcaccataaaatacctcccaagcatgatttctaggtttagttaatgcatgcctacaatattactactcatagcataggccggccatcgatctcataatgaacgttggcctcatcagcagtgaatagaaagggtgaacatatctttctcaataactagggtatctcttcgtattgaaaggcggtaggaccagcaacgacacacacacacagttactgctgtactgcagtaggagtaataactaaggatttcaattgaaaagaagagatgaaaagtactactagtatcaatcaagcagggaccggaccaagatcgcatcacattgtttatctacatgccgccatcgatatatgcctgcgtgttttaaatttatggcagtgaaatctaacgctccaagaacattaattcaaaagctagagatggatctcgatcagtgaacaaaatccattaggtagttcatgccaaaattgaaagtttggttgaaattggaacgatgtgacggaaaagttagaagtttatgtgtataaaagttttgatgttatggaaaagttggaagtttgaagaaatattttggaacaaaacaagggcatagatagttcaggaagaaattttgattgatatatagacaaaagcgatgatctcataaaagcttgagataccagctgctggatcttttatgagctctatctgtgctgggacccaaattctcttttcttacggatatttaattgtaccaacagttcgatcaacctcattgtaaatatgctcttatgcacttaattaacaaattaattacctgtagtacatgggagagatagatggaccaaatatataatactccctataatggcttgtcaggactgatcaggagttgttacaacaattcaattgcttctgcaggccagaatcagaaagaaatcacacagcaggatctctccccattttaattactcctctcttgatctcttcctacaattgatggaaccaacaggcttttctttcccgttgatcccgtcacacgcatgtatatatatctgaatcgttagctaacgaatcaagcatattcaatgttcataggatcacccccaaatctctctctctctctctctctctctatatatatatatatatatatatatatatatgaaaaaatacgaattaccccctgaaccgtggcagttcattcagcattctatttattaaaaaatgtgagacccacctgtcatactcctcccactcttcctctctctcttctctcactcttcctctctctcacgcgcacggcgaggcagggcggaggggcggcagcggcgaggcagggcggagggcaggcggcggcgaggcgagcgcggaggcggaggaagcgaggcggtagcgaggcagggcggcgcacggggcgggcgggtgagagagaggaagagtgagagaagagagaggtagagtgagagagagagagagagaagagacttgacatgggctgtcaagtgggctagcccaaccatggaagctggttaaaccagcttcatgttggctagcccacttgacagcccatgtcttgaggtccataaagtctatccgtgacagggtaccatatttttttaataaatagaatgctgactggactgccacatgtacgccacgtagaccaaaaccaccgcagattaggtcgaagggggtaattcgtccggtttgtatagttgggggtgaagaatatccggttttcgggttcagggggtaattcggacgaccgcgatagttcgagggggtaattcgtactttttccatctagatatgtactgtctgatctgttctgaaaacaatgacatcctaaaatacgtacagacacacatctctcaaaagaggacagctaggggacggaataccgttcatctgacggtatagtttatgatcttgatcgtgcacgacattctgctacccccgcttctccgaagggacgcggcagtagtgctcatctaatcaagtctcctatctgggttagtttggttgcactgtgaggaagcgggactggttggcctatgtgggacacagctagtctgatagtaataaaagagttttcttattggtctacacactctgatgtggactaataatagtctagtatctcgttaggtcatatgctgatgagattgggacaattgatacatatattcacaataaatattttttgttgggtcgtgtgctaattagggtggaccaataaagatacacacatctacaactagttattataaagtacggagaaatcatgtacttattgtcacgccccgaactagccctgagcggaactagcccgtgacgctccaatttaacctgttaaccgataccagtcccaggaaacagtgctggtatcacaggaagacagtatatcacagcaacagaggtctctttattacagagtaggagtacagtcatgttgggctgcggacagatcccgagctcgcaactgcattacaaaagggaaagcggaagccaagacttggaccaatcatcacaggcgcgacttgggaactaggccgaaaccctaaaactcatcatagccgacttgctcctagaagaactcctcgtcggcgggggccacattatcttcttcagcaactgggggggggattatttatatagagcaagggtgagtacaggagtactcagcaagccatgggaattaagtgtttaatgcaggcttcaaaggaaaggctgttgtttttgcaattgattttatttaaactcctttttgaaacaactaagtgagtgcttctcaaacgacacggatgggacagtgcgtctcgtccggtcggagtatgtgcaatgtatcagtctttgaattgatcagggttggcacccggccaacagctttcaaacggccacccgagcctggctgatcccatcaaccgcagattttttcaaacatcgaacccattccacagcagcaatttcacaaagcagtagtcaaacaaaactacgctaggaatcacctcacatccgcccatgaccgtgggcacggctgttcaaacagtttaataacctctgcatagggggtacactttacccacacgacattactaacccagatcttccagcccgtgcagaacggccacgtctagagaccttaaggctttcatgacaaggcatttcgaaagccgacacaggttcaccatatgccaacgagaggggtcccagaccaacaacagattaggtcccagaccatactgtgccaggaaacccgggggttctccccggcaccaccccgttgaatccacatgtctcttggcatcatggcacccccgattagctagttactcagccaggggtgtcccattccacccatgtggtcgcacttgtcttatgttcggatgaaattccaaggaaacagtccttaagtgcaagagcgggaaaccgtactcccggtacgttccccggtccgcgattttggaaattcatttagttcgcaagcaccgacccaggtgtcgggttttccaagtcttttgtaaaacccaagttttacccatcgttggatattttaaattttgagggggggtgttccgatgcgcgtacccgaaggcccatgcatcgaagcacaatagttggcaagggaggtttaagtgttcaataattcacggagggtaattgcagcaattaggattgggggccagcaggctatctcacaagccgcggccaaattacttgtgtagatcctattcatgcaatatttgcggaaaagaaatacttagatttaaattataggtgcaagatgatcaaaggtgtcttgccttgctcgagaccttgagcttgatcctcgaaatcctcgcactgcgggtcttcgggctccgaaactacacgcgagacgggacaactcaacaaacggtgaaaataaagccctattatggacctctaagcgtgccattagatagatctcgagatttgaggaattttagaagttgaacggagtcaaacggacttacggttgggaagatattgaatttctaagattattggatttttgatctaaaggaaaaaggatttatttaaaacctttttgagaaaagaaaagaaaagaaagagggaggggaattagacttccgtcgggcagctagggcgcggcccgagagaaaggggcggctcggccgagcttaatgggccggccggcccgagaaggcggcccaaggcgcgcgcgcgggcggggaggagagagggagccggtgggccgggtccatctcgcgtggtcccgagtgggacccgcttgtcggcggctcggctcaccgtgagcgaggtgcacgcggggcgtgctagggtttgggaaggggaggcgcggcgcacgcgcggttcacggaggacgcggtgcgcggcaggcccacgcgcagcctcacagctcaccgtggaccatgcgcacggggagggtggaatggagggagcggctgaccgggtcggccgatttggtcgtgccgaggtggcaccgacatggcgcctacatggctgccacgcgggccggctggaggaagacgaaggcgccggccgcgaatggacggcgggcggtggcggtttctccgggacgccgtgcgacgacgaggggcgacggggtgtacaccggaatgacgagggagaacgagagggagcaagccaacggcttggattcgccggagggagttcgtcggtggcggattgcggcggcggccaccggcggcgagagaagaggggaacgatggcgagacgactagggttcgattcctccggactagagcatctacacgacctcgggattgcattccttgcgccggattaggaggaaacgcaccgagggtggccggcgacgagaggcgctaccgagctcgggcggcgacgacggcgagcacacagtgggcggcggcaaggcttggggcggcgccagctagctatggggaggttacacaagcttctatcgaaaactaaggggaagagggggaacgaggagggagcacggggagatgcactaccgtgcgggacggggcacagtgacgatgggccgacggcacggtagtgatctctccggcatcgggccagggaagcggaggaagacgatgcgcccgaagtccccttcacgcgtccttcgcacgcaccagctctcccggtgcttggcgatgaacggcggaggcgagacagagggatggcaatggcgtggaggtggcgagcgaaacgggaggaggaatcgatgggagggcaccttggttaaataggaggcgatgtcggtttgggaaccgaccaagggcggtcaagggagcgagctagcgctcggcggttgcggccaaaacggcgacaggggggtgacgccggcggaagagaaaagggaaaatgaggagagaaaggggggcttgccccttgccactttgggaaaaggaggagggagagagggcgacgcggcagagggaggaggagctcggcctccatcccttggaagctagcgcgcggaggtggcggggccgggtcgatgacgacggcgatgacggcggaccggtttggagcggagcggcgacacgggcggcagatgcggggcaggcgcggcaggtgctgacagcggcggcgactggccggtcggccaacacggcgtgcgcgcgcgggaagcaacggggcgacgcgacgatttgggcggcgttggcgggaagcggcagcgagggcggagggcgctcggctcggcgcggctcacgagcacgcgcacgcggcgcacgggcagagcgagggagagagggagagagggagggagggagagagagatgggccgagaggaaatcgacccaccaaacctgagggaggcaaaatagacttttgcggaggaaatgaattgggaagaaaaaaaattgagattagggtttggatttgacgatggatcggggattcgagatccggaatggcacggagactgactgcaagcgaagaaacaattttcgcaattagggtttttagaatttaaattttcccgctaggcgccacgacggaacgggcgctacacttatcatccatgaaaccccatgatacttggtactacatagtaccttatatgttatgaacctccaaggtaacagacctggtattacatatgtatcatatgtggtatctaggtatcagacttatacttagacccagtatctaggtatcagattttgtagatatcgtgggtatcatatatgatatctgggtaccagatttgataattagacttggtacctaggtactagattttgtaaatattgtaggtaacatatatggtacctggcatgatacttgatacctagggtatcatatatggtgcctgggtatcatacttgatacttagacatgatacctaggtatcagattttatagatactgtgggtatcatatacctgggtatgatacttgatacctaaggtatcatatatggtacccgggtatcatacttgatacctagacctgatacctaagtatcagattttatagatactgtgggtatcatatataccttggtatcagacatgatacctatatatattagatatggtacttaaaacaagataattaagaaaaagatgaacataaaacaagataattaagaaaaaagatgaacataaatctagataattggccatggctctttccagcaggcccagctagtatgtgagcacctcttatgcatgtcctacaactaatagaagaagaagtcacgtccacactcagcaggacagtgcgacaagctagttcatcacgtgggagcctatccatatctcgcatatgaggtaggcatcaacgacataacgattcgctcacattaatcgtcccgtgacaacgggataccgttttatagcttttctcctctcaaaatcgtaaatcattaagaactataaaagaattagaacttgatatgcaaaaaatatattagcagatttgatgtgggaaaacttttgaatagttataaatatatagtttgaaaaaaaagtaattataaaacatgtgtattagagacatgtcggtatgcaaataaaactttaagaagaagaaaatagaacttgtacgtgttttgcagcacagaattaagagagctattgatcgatccagcagagcgtaggccatatcaatgagactcccatgaatatgcagaagctgcctacgaagaagctaggatagttgctaagctaggtagcttcctgttgatccgtatttctccctccatccttaaaaaaaaataaaccctgagttttcatgtacaacgtttgaccgttcgtcttatttgaaaaagttatgaaaaaaaatttaaaaaagcaagtcacgcataaaatattaattatgttttatcatctaacaacaataaaaatactaattataaaaaattctatataagacagacagtcaaacgttaaacacggaaatttagggtttgtttttttttttgaacggagggagtacaatactatatatactgtacttatatggttagctttagcaagctaaaatcctgtgtatgttacatctgtacatgtgctctaggtgcactttggaaaattcgtacatatatacacggtttaattatccggacagactttagcttggtggtacatgtcctgcatgctgttctgtacttctggtagggattaacctgctccgcctatattaaaaaagcaatttttatatatgaattttaacttagcgtatgtctagatttatatataaaagttacattttcgagatagagggattaaccacctaaataaacatgatattttaactctaatacattggcttcaatacaatgcaacataactttttattcatttgctctcaatatgctactctacttaatttcgttcttctcctcttgtgacttagcacatttgggctagctagctattcgcatgtaatgccacgatctagtgtactctttctttttctctctttcttttctctaaactcgcctatacacatttctccccccaacttcatggatcaaacaacacgttaacttcgaatatctaacatttagatttaccatcatcgtcagatttgtaacatccagtcaacttaattaattacccctgcgtgcatcacagcttttaattaattgggagagagaattggagtaaatgtatatggctgcttttcctctgttcggccataagaaaagctctaggaattgtggtaaatggcaaaggcttgtgcatgcaggggttgataattaaaggggcaaaagctgctgttgcagcgatcacaatccgaaatgccatactagtatgttgagtcccataggacgcccttcataaagagaggggtctttagatccacgggtgtaaagtttcggtgtgtcacatcaggtattatataaagtgtcgcatagggtgttcgggcactaacaaaaaaataattacagaatacgtcagtaaaccacatgatgaatttattaagactaattaatccatcattagcaaatgtttattgtagcatcacattatcaaatcatggagcaattaggcttaaaagattcgtcttgcaaattagtcgcaaactgtgtaattagttattttttagcttatatttaatacttcatgtagatgttcaaacgttcgatatcacagggtgaaaaattttggggtgagatctaaacagggccagagacactaactctcaggtagagggccaacgactataccatatcagaatattagggtctattttagagagcttaagaatctgagaagcagctggttggtagacagcttctgagaatctcaaaaagctgggttttccaaacttttagttcattttctggattctacaactacagctttttagaatctgaaccaaaaattggattgtttgcgggagtttctggttatgagagaagctgcagcagctagaagctccccaaacagacccttaagcttgttgccttatcaatcatggttaatatttaaatttaaaacttaattttagagttgattttgaggtcaaagtagtttatttctcaagctgttagagctattatacagctggagctatgaaactctgagttctaaactacaacctaaacagaactttctcatttttagttagtttggaggaaaaacaaaagatttggactcctaagaattaattcttatgaggcatactcagtttgtaggaatgtaaatataggtaaaccggaaattttccttcctacaagttgaaaaataattaaaacataaaaaaatcatccacttaaacctcttgaaaaattcatatggattaaagtgtgcatacactcatattttctctttttatatttctataaattaaaattcctccaaaccgaaatatcatggtgtgacataggatgtgcactttacctaaataaacacaggatgtgcacatgtactcctaaaagtattaatagttggccatgttttcttgtttcaagaccctggaaacatccaattaatcatgtacaatcaaatcatacgctagtttcacatggcggcacggggacaaaatctttttttcaaacagtccctatgtctatatatataattgccttgtcgtggcagctcccgcgtgcgtgcatctattacttgttttcggacatctcatacttctcattttcttaagtgatcccccctactcctaattactaggagtactagtactcgcatggaaatgaatgcaaataacaggacaacaccagtttccacttcccagtagatgcatgttactcaagggtccaccctccatgcttagatggaagtttagacagattacaataccatctgtcaactaccacaaatgggttttctttctcttttgggactagtacaatttgttaattactgttccttaggctatgaaaatatgaaaaaaaaatgaaaatgtaactttgatcgctaatttctattacagtatatatattgcagaacttgagaacattatagtattatgaaagtatttctcaggacagcctacaacgacttttatccaaactaaacattcaaaatgataatgttcaaaagtttgaaagttccctttgagatgtgtactctaaacgattggttttcgtgaccagagtaaaatctagttgtttacatcttttagcattgtctgaataacaagagatcagattattcttaaagtggggatccgattgttttcaaggcaacatgaagttctctcaatcattagtccattactacataagggtaaagtcatactaataaaggaacttttaagtctaaaataaatgagtatgcagatggcgggacaggttttgaagtcaagtccctacgtgcctactaaccaacaccatgaatccgaacctcagaacctgaactgaactgggacagttcgcgttcgccctacagtgataacaataccatcatttgggcctgctaaatgtaaggggctctgatggtgatggggccggccgggctgaatttatggacaagtacagaagatgtggggctctggactctgggtaattaggcaagtttacactagggctgttcacccgggaattttcattttaaaccttttaaatttttaaattttaaaaataaatccttttaaaactggcctgggtacccttcctctcatctccggcgttctcgtcgcccgagtttgtgtcacgcaccgggtagattcagaaaatttcccagatactccctccatccttaaaaaaaagacaatctagaagggaatgtgaccactcctagtgcaacgaatctggacagagcaaaggttacatctcctcctaggttgcctgtaatatctcgcacaagaatgtccatctcactgagacatgtttctttctccattcttgaagaccagaggaggtgtgatcctacacactacacaacgataggccggaaaggcaaaaaagattgaggcggccggctccttacgcgacggcgatgcgaggggtgccgcgcgcggccagtgatccgttaattccagaaagcactcaggtgtcaatgtgccatgccacgcacatggtggggagaatgaggggatcatcaaccgatagcccccaccaagccgcctcgtgattcgtgctaaggagcatgcacacccccaggctcctactactactagtagtgctgctgttgtttccatgctttgaacttgttgctatgctattgtgtagtaattgtggactagggtagccagatgcgtcagtgcgtgcacgttgccacttccccaattcactatagctcctccagagttggagctcggaggcaggggcagatctagcgaggggcggcgagggctcgagcctcctttactggcgataggattatggaagtcttcactaattctttttaccatatacattcgaaggggactatagatatgtctagtttgttcagacccttctgttatttcttaatacgccactgctcggaggtaggactgtgcagtgactactaactacaacacatgattaaattgaaagcagaacagctcactctcagttctgatcacctagaggaaaaggggatgagagtagaaggcacaagggcaaaatttgcacacggtctacatgtgtatatatatatatatatatatatatatatatatatatatgtgtgtgtgtgtgtgtatatgtagtgtatggtgccgcgctaggcttgccatatatatacatcaaaggaactcatcaaaagttttagaattccgaagtgctaagaaactgaaggtaaattcagaatagtagtagcattgcttagttagtctactgaagatagcaacgatcaaaggcattaagcagtttctccctgaatactggtaattagaaattactggtgttagctcgaacctggagtgagccttttacagttctgatcttgcgcattcttcatcttctgctggccttccagtacctgcagtaagtaagaatgtacatcaagcttaattatggccctagctttatcttgatttttaaactaaaggatggaacggagaatcaagaagccgagaattacctcaccttcttgacttccttggcctcccaaccggtttcttcgcctgggttggagccaagtctggctcctggccaaccgctatcggttcgccttgatgtgatggaccactccttgatcgggttctgctgtcaatgtattggcgacgatatacattagcaggtgaacttctcctagtttgagtgctcctttgcaggctagctcctgtgcaattcctaggactgttttcaagcggcacgcctgttgatgaactgaatagatggaaggacacaattacttacgtattgcaataaattcttttatcatgaaaatataaaatgtatatagtagtatatcatctgttcattgtggacagtttacattgcttgatagaagaaatgcatttcagattgttcataactagtaaggcattataggctgaccattggttatggagcatgtatacacattgcagaatttagatattaagaaaaacaattcatgccatattattgcaatgttgtattaaagtcataaaacaaacaaaatgaaccataaataccagatatcatgagtttataacaggaaaacaacattggcccatttgaagatacatggctgccatggacattacctgggcgcagcctccttgtcctcttgaaacataagttttgaaacagaacaagggtcattgcagatggtgcctgctgcagaaaaactaagagtatcagacgagttaatagtagaaacctaaggtttatactcacagaatcagaaactttaaactaaatgcagaaacgtactgttacggtttttgcgtgaaaggactactatttcaggatcaaaaggaacaatatcatccaaaggttccaccttaataggaaaggtatttgtcaggtcctgtgacaaaatttggagttactttcagtaacagggcaccacagccgaatttgacaaattccaaagagcgacacccagtaaactagtgttgtatagtccaagtacccgatcagagtatggatagagcatggtaggacaacggttatcccggttggcttcactagtggctgaagcaaaggtccgtgcagttacagcaggacgcttaccacggagagctgatatgtcattatcagtgtcatcatatgaaacaatgttggaaaatattaggttgtccgtcccgagaagggggatatctttgaacagcttctttgtatcttctggtatccccctgaatgcattagggtacttggtggttgcctcttcaaatgaagctatatctatcacaaaataaaggcacagaaatagttgatgaccaacatatatcccactagaataggctttacggttttgaaatgtaattgcaacaattacaacatattttacctgaatgactcttaagaataccatcctgcctatttgaaatgttcaaatcatttagctttggtctgacacttcgggagtgagactcatcgaggttatgtccagtgcaagaattacttcttttcagagcctgcagttgttcaacaaaactgcaagttaggctcctataaattgaactgtgtgaacctggttaggcattctctttggttgatttattcaggcttgcagttctgcagttttgatcttcattatttatagttttgtttgctcctactataatgattcaatagcagatgatattccacttcaagaagaaaagttagaacgtttgcatcattccagggtcaaacaaaaaaatgcaagatttgaacaaataaaatgagatacctgctctgagatagactaagtattgcccacgaaaaacttttaggcatgctgttagccaataaagaaacatcacttggtctagaaaatgaatggtattaaaatgacccaagaaggttagtagctcagaattatcaaacccatggcctatactatgaagaattttgtagtgatgggagaaaaatcagaagaaattaataacatgaataaaacctcagaaaatatggtgtactttggcagtttacatcatcagaagtagtcataaaaaactgagcacagtctaatggtattgaaaaggcgaatataaggtgcaatgtaaatacatgtcatgaaattctgtgatcttgagtaccaacatatttagtgtaaagtatatttccacaaggttcagagagttggggactcacatgctgactctcttcaagccatccgttctcaacaatgttgttgtcaagctgttggctacaatcatgaacatttgaactcgcagagcaagtgtttggacgaaatgaagagtatggaacatgatcttgctgttggctagtttgccaagcaattggaagaacaatagaaggttcaaccacatcagggtctgagtccacaacccgctcgtgaattatctttatcagtatatcacattccgatctggcacgtaattgaagaattgaagtcaaacttagcagtcaatatgttcagaaattgcctctgtgataaatagtcataataagaacgaatttccctatcaaacttatgtctttttttctatatcatctcaaggagataataacagaaaggccacgctcttgaaatttggtctgatagatatattagtaattgccggccacagatacatttagcttatgaaagtactaaaatttttcaccggaaggaagtactgaaattcaatgaaaataaactcatatgattaagctaatacagatccaatagtgaaaagattggttgtacaactaaaaaactacagcagaagaaaacaaagatataaggtatgataccttgagtacgtttcttgcaaaagcatctgcagtatagcatccttgggatctatctctgagacaagtgctaaggatcccacaccactgtcttttagagtaatctcctttccgctctatgatcatgaaaaggacattcttgatcaatctcttcatcactcctaaactaagatttacagtccacttgaactacagagatgtacaaagatggaaatacctggttgaactgattgttagaagcaaagtgcgcagtattatctgttcatttaagaagatatagatcaggcaaaaagggagcaaactttgatgtgttttcatcatcgagaaatgtgaagcacaaaacagagtaatggggttaatctaatcatctgttgctacaaagtatcgcatcaaaaggattcaatagttgcatgtatggcgttcttagataatgtaggagtagaatgcatgtgcttttagaaaagctacaggaaaaagaaaaactaagtatgtttcaatgctttgtcctaccagagattaactgaaacttcaggtggcagagagaggagcatcgacaaggtcaaattccagtctcaattttcaagcattgtacaatgggattcagcccaacaccccacaccattttccccctactgttcaaaccaatgaccagatcactggcaatcatacagaaaacacaaggccacctacacttctctagttttaaaattaacaggttcagtacaatatccgtgaggaaaaaatatttctccaagttctctccaaattggcaaatgaaaccactactaaaacctagagaatccgatcatattattatacctctaactccgtgttcgtgtgatgctgcactcggtttgtgcaaaaattaactacaggattaggtagcgccaaattcactcgaatatttcgcaggctaaccaaccacacggacgcgccaccatctccagcgacggacggcaacggctcacgccgaacacccgcgagggcaaacagcatcaaccacggcgcaaaacaacgcagcgcactcggattctagaactccgctcgagggaaggatcgcgtaccgccactgccgcggtggccgcgcggaggcggcggagactgggacgacgactcctgcgaggaggaagcggagccgccggtgccggagtcgggggagtccgggccgagcacggcggcgaggaggcggccggcgccgcataccaggccggagaaccaccctccgggccgctccgctggcggcggcggtgacggtggatcatcgcctgcggcggcggttgccatggatggggaagtggagaattggagggaaggggattgagaggaattttttttggttttggaatttgtgggcagttgcgctcagttactgcgaatattaaaatgaagtgatttttcgaaaaaaaaaatcccggatttttcgccacggtgaattttcagctttttttctgttttatttgctcgcttcgtgaacagcaaattccagaggcttattgaaagcccgtttgaaaagctttagagcatcaccaagagaatcccaatatttcattctcaaaactattctcaaaactatttttataggaattctaaacaaaatttgatgtgctaaaatattgatccctccaagagattgtctgaaattgacttcctaaaactaaaaggtgggccctctacaaaaccactaactgaaatttatttccgtctctccctatgtgagatcactctcgcgaactcctaatcgcggcctcgacaacagcacatcaatagcagcaccagctgcaaaatttaggaaaaacagtagagaacaatagcacgagaaccagcaagcagcaacagataccttaatcttcagcaagtgcaacaaaggtaatctgtaaaaagaatcacaagtgactgaccgattgaaactccttggtaaataaaaaacatggcacaagtttgagcaatggtgcaagagcagagattgggatcattcacttgcatcgctgaatgaatcaccaacggtaaactgcttcgacggatgaactcatcttcatgagagaccaatcccagcaaaaggaatgagcaactccggccgagtcatgatgatgggagccgatgcaggcgggctaatttgcgtcgtatcgaggcggtggctcaaatggaggcagcgatggtggttgggggatagacgaggaagttcaccggctgcagtgcagatggggccgctgccgctgccaaagcacaagctgccaacaccggaaaagctttggggagcggcgtatgatttctagccggccgcggcccgcgggtgagatggggctgcctgcaggacaccacgatgaggcgacgaatgacctcgcggcgaaccccaggtgagaaaatttcatgtggcgcgggaattcgctcgggagagggagattgggagctagcgcctctccccacttgtggagaacgaagaatccgggcttgggaattccaaccagtgggagcttggctagggattctgttggactgggtttttgaacgaaaatccccaaatttcaggattgagaaaataactacaacttcttaaatcaaaacttctcccaaacaattcaaattttttttagattctgcaaagttatagttatcagttatggaactcaaaagcgaactacgaagtactccctccttccaaactacgaagtactccctccttccatgaatttgaatttttttagattctgcaaagttatatagattctgcaaagttatagttatcagttatagaactcaaaagcgaactacgaagtactccctccttccatgaactaacgtcataataggaggagggagtattagttgttgaattcagaaagcaaattaaaaattaaaaattggtttttccagccgtttctcggaatctaaatctcctaaacaccctgagtcagtcacgtttcaaactcgttcaaagcggaaaagtaatacaacgcttatgtatttcatatttgagcaagtcgagaacagattgttttgctttgatccatggaagttgtcgtaagtttgaaacgaaacgtagaattcaaattgcctttgatgttatcgaaccatgaaacacaaaactgatagcttatctaatttggctaatcatgacaggcaaatggtattttcttacgaaatatgatctcacacattccgagcaacgacagtttcaacgcataacattaccatatcatggcatagttaaagatccaggtcaatctgcatcagttgtacatgacacttaattgttcatgtcagcagcatattacaataatcaatctggacatggcccgggctatctcattccgcatcctctatctcggtatcctctggaacgcctcggagatacaaaacgttgttgcacctgtacagttcacaaatgaaacaaataagaattatacatcagacaattgaatatgttttgtgggcaaccacaatgttgaacaaaagcaggtaacaagcaattaatataggcttataaccaggtaagaagcattgtgggtagagacaataactactaccgggccattgtgctactgccggtaacaagagaataaagaacaatattttctgtagatatgggaatctttttgtacgagcatggctataggagatagttttacaatgattctttttaaggtggaccccaccttaatttgcagaataggcatagcacattgtgagctttgtaataactgttaccacctgaaccccaggcccacgttattatccactttggtagtatacattgcggttgctctttaacgatttagtcagcaaaagacttcccaagttataagcgctgctacttgttatacttctgcatttgagtaaattccatatactctgaactctatcattctatctctccacattttaccatactatcattctatctcttaatattaccagtcagactgaaaacagggtaatagcatgcaagtaaccaacagatcacctatgagtacataagtaccagcggtaagccaataactacagatgaatctggtccaggactgaagggcgatatatagagttaccttatcagtatctcacccaagtttccagagaattgcccatcaatatactcctctgtattagccagctgaaagcagtagacaattaggtaaattgcagcaaaagaagatgacacgtcgatccatattggtaaatgaacgaatttaactgatacaaaatacaaaataatacctgcagattcatataagagtcgacagaaacaagatatcctgaaaggggggtacaaaaagagtatcgtcagcataatcgataataaggcacagtctgaaaactaaattacaacaagaggacccattttaacacatgatttccattgaagttccattgtaaaaccaatgaaagtggatgttcttgataagtgccatgaagtaattgtccatggaagcaagaaatttcatgtaaaaactggacaaatttcaatgttcctgaaacctcagagatttcattctgaaatttcaatcactagcctaagcatatcagtgaataaaatgtgacgggtaaaagtatagattacctttgtattccataccccacttaagtttgacaatgacaggcttccctgtcaggttgttcaagaaaggcttcgggttaactggcacagtctgcatttagaaacaatccattaatagtatataaaagagtatagacaagatgtatatggaggcaccacttggaactgaataccatgaataatcatcatgaagaaaatcagaagaaaacaaatactagtcaggtcagtacaatgtctgtaacaaatcaagtttgttttgcaattatctgcagcaatagaacaccaaactgatgtgttgaagccctaattagcgcaagacgctgggtgctactccctactcagccgacagaccagcagctacataccgtaactgattacgcaggcctaacaagagacaggcagaagccaatccaggacagaccggctaggggcaacgcatgacatttagaccactgggtcattgtctttgttttccccactcaaagagggatacaatagttcctcaatgctcttctgaagctccaattcaagtaaagcatagtccacatagagaaccttgatgtgaacagctgagttgtcaagtttcaaatattttttacaagattaagctgaagatgccctttcctcttcagcccatactgatgtaccagtcagaatagtgagcaaggaatgggaacacttcttgttcttgcatcttgagcagcatggcagattcaagtgtgtgcttcccattcaaactcttcttttactctgaaatattgaatttcattttatcacaatccatggatttttctgatgttcaattcgatttttggcagttgtgctagtgatatgcgtaaaggaatcacagtttctgatctgaacatctcagaaaattaatggagttgtactccctccgtactcataaaggaagtcgtttaggacaatgtttaagtcaaactttgggaatataaatcatgaataactctcaagttgttgagtttgaaaatataaaaattatatgtatagatttgtcttgaaaaatactttcgtaaaagtatacatatatcacttttcaataaatatttttatagaaacaagaagtcaaagttgtgttttggagaccgtgtcgctgtcttaaatgacttcctttacgagtatggagggagtatgtatctttgttaaatttctggattgaaatttctattttctggttttaattcaatctggcacgctttctgtttctgttctgaattattcagctatcaatctgtcaatttctattatcaacttgtcagtctgaatttctgtgtgatgcttagtgtgcactttgcatgcgctgcagcctgaactagtgcacagtcctgcagaacctaatggggccagccagttccactgcaagagggacgggccaatttttctccctggtttccaagtggttcccatctaaattggggcagagggtataggtgacgggttggcccatcccgtcccgttttcggactgatctaccatgacttgaggataactagggaggttcgtgtgccgcataaaaaaagaaaatcagagcacatcttccaaccaaacaaacagctctacatccatcgttctttcaacctgaaagctaagcaagggtccaaacttacactcctgcgccataaaagataaccataactcaaaccacatcttcgaaacaagcagctctaggggtttcaaaaagaaaaagaagaagaagaagaagaagaagaagaagaagaaacaagcagctctacaaccccaaaacgaacttttgggggattttctaaatacttcaatttttccctcaccacaattcgacatgaaacctatcccaaatcacacatccgacctatctatcctggaggtcatagacctagaacagttaagccctccaatctatatccacctactccgaatcgagcacacgaagctacggctacgagactaccacaacagttggcaccaaatcacgcgacaaaaaaaaacattcgaagcgtaaacagatccactacacgagataaacaatttcgcggagtaatatcgagggagaaagagagagagagagagatgagggcaataccgccattgaaggggggtagccgccgccgccgccggtgccggtgctggtcggggatgcgtaggggggaaggcgacgaggcggcctagctagggttttgaggtggggaactccgataccaccgcctgaactaaaagtcgctcgatgggccacagcccatttatcggtttgagcggttcgaataaatccatttatgtccttcgtctttccgtcgagttttactcatgtcactgctctcttcgttccatattactccctccgtatttctctcttcgttccatattactccctccatattttaatgtataacaccgttaattttttgataaagtttaaccattcgttttgttcaaaatttttgtgcaaatatgaaaatatttataaagaacatttgatgataaatcaagtcacaataaaataaataataattacataatttttttaataaaacgaatggtcaaactttagaaaaaatcaacggtaccatacattaaaatatgaaggtagtataatttaaacatgtgatagtggtaggtagatagtcaaaatacgactatctttaaacgggagtatatcttacggcagtatgtcggagagccgtttgcattgccataggacctaatttaacttggttttataagttgaggtccagatttttggtattacggttaagatatattaaacttgacaaaaatatgagggacgtcaagtggaattatttctaagcggtttaaatttggggtcgtgcactctttccttttaaggaccatatttaaaaatgttatgtatataaataatccaaattttctctttttattaacatagtacatatgcagacgtttatataaacatgcgtacacacttacttgcttatcattgaaataataattagccatgaatgtgagtcctatgtaaagtctatgactctaaaacaagcgggcatgttccaccaccagaaacctaaccagtcgagttacgctcgcttcgtaattcaaatttgtttttatttaccataatttatataatgtgttgtcctgttgcagttaaatatagtgtaaacacaatgtaaagaagaaaaatgcagtcccttgtttatttttatttgcaaaataccgttatctataacaagaggggcaaattgatttttaccatttcattcaaagtttgaccttaagcattgactacatgaacctgaaaaaaatattcccgatactaaattctcaatgcacccacatatatcaatagtttacagaagcacttttcaatatttgtttggttctaacacttcttacgtcaaggttggttgcccaaaaaagaagtcataatgtgtaaacacacatgtttatataataatcaattagtttgttggttctaagacgtcctaactcctactcctagctggtcagggttggttgtcctgaagaaaaaagaagcgcacatatatgtaaataattgcatatacatgtacaataataaccgttaagtatatagatatacatgtgttcacaaaatcacagactcacaggcatgtgtttggctagccgtctgaatcaactccatgaaattcggatagccaacgttttgcatcagtactaacttctgccgaactcgtaaacaaaacctaaggccattagccagtaattgttggtgacagaaaacattagccccaaatactgttaaacttctttaaataagaattgttaaatttcataatgaggctttccacgacttgatgtttagctacatttatcacccagttcaattaaattaataaaaccgcaactgtgtagtcacgtagatgacgatttgcagacagagatggcgatgcatgatttcagagctggtcggatgagcaactgaagtgacatagaagtagcagctaacatatatatactccatctatccaaccaatctcgtactagattataacacatcttattactatgaatttagatatccaaattcatcgttttactatgtaacacatcctactatgagattaatttattttatgagattaatttatctttatgtatgctagttctgaagacaatatgtagttaacatgcctaatatgttttggttgcgcactttgttaactagcccccattttttaaaaaaaaagaaaaagaagaagaaaaagctatatatctagagaattttgtatatactatgtgaaataatattatagagctttttgaaacaagggattgtttcatactcattcctttaaattttctatgaaataaaccagtctaagcaattttggggggaaataagcatgagatttcacctcatggtttttcctctttcacgtgttttttctgcgttctaatcgaacgatggttttgtaatttccctatgttgcaaaattcacgaaagttatgttgtgaaattccgtaaaaatccaatgagtatgatagtctatttatacgtttttcttattctaatgtgttttctcagtcctgcgttttaaagggttcttagcccgtgcgaagatggaaacagggaaaaaggttatgtcatatatactccctttatcccattgtaaatgcaaccataaattttcatgtctaattttgatcatccgttttatttaatttttttatgattagtatttttaatgttattagattataaaatatgaatattattttatgtgtgacttatgttttttattatttttttaaaatttttttaaataagacatacgattaaatttggatacggaaacatatggctgcgtttaaaacgagacagatggagtatttgggtaggggattgcatcgaacctcaaaattgactagctagtctattatatttacttgatgaacctagtaggtgtgtaattaagaagatcataggataccggaggttatttatggcgacatgcttgtgatccaccttgatatatatcgttgttaaacaataatgaacaaatgcaattaatggttcagatcgatgaaagtgcttaattaggcttatacgtactaactaaaaagaaggacacgaacagcgttattcatctctgtgttacatatccaaccattttatacttgttagtagtggaggcttacgagtacggatgaacatgaaccggacggataatccatcagaacatatatacacatgtgacaacgttttttcttctcctagaaaagtcaagcatttactccccagctaatcctatgattaagtagtaatacaactccaacgtgttaggtgattcgtttttatttttatttttttggcgcgagtgttaggtgacttgttcgtgcgaatgagacatgcattgcatatacacatgtttttgtttgtttaatttgctccagggactccaggctagccgatcgaagccacttctggtgtctagattagctagtgcctaaaagctggagaacctaatttcagcatcgatcgtctccgccggctaacaaagattccttgtctcatgttgcaatagctagctcacgtaggacatgcaaaaacttaatttacagtatgctttgaaagtataattgcatgaaaacctattagtataaacggctaccggcctgtcattcggcattttttttaagctatagtcgtcatttttatgaccgttggatatgtgttaagattcgtgctggttattggatgcatgataaaattcgtgttagacggccggtaaaaaagatcagcacatgtggtgagttacatttgatatatttttaagggattttcagtcagtcccatgatgtataaaacataccttaatcttaaaaaaaaaattggactaacatatttttgatattgacgaaaacatccgttcaacatatgactatcaacggatatatcatttatatatataactgacaaaacaaaaaacaattagccgtaaatataagtacatgtgttaacttgaatccatatgaactgatcacaccacatcagttgagctacgcttattttgtgtctttcaaaacacatcgtacatttgggctgtgtacatccattatggatgtagaggccggattttaatctattttctaaagaaaaaaacacacatcgtacacacgttccaatcggacactgccaaacgtcttcttcacacactcaagtcatcttatctcctcccggcttccatttttctctacacagaaggttaggtatatctagctaattatcagtactatatatacacacacccaaatccaaaattccaagtgcttaccttagcttagatgcgaccgagcgaccgaccgggtgtagccgcgccgcaacggagttaacattccacccggccgcggtgtaccgtgcaccggtgtacgtacgtggccgccgtgatctacagactacgcgacggtgggccccacccccaacaaccgcggctcgcgcgcgccctctcgttcgcgcgcgccgccacacggatgcctttttttcctctccttttttttctttttgcttggaccataccgaccgagcgagtggacactggccggccgacccgatccgtcctccgccactatacgtgctactgctacctttctgccttttctaccgtgctactggcgcggtgtgactgacgtcacggtgacgtcagccggtaggttcgtttctccgtcgccggggcgtggtaggtgaggccgggccggttggacgtcggagcgggtctccggtccggtccggtctagcccgtggaagcaaacaattgaagaagaattccttttgactctcttttaattaaactattatctctgattgttgttttgatcattcttttttcttttttaccccttccatagatgctacactgcataagtccaagcttagtgaggtgtggtgaccatcgctaagctgatcggaaccgtatttttttttttttggggttggtggtgttgttagattataatccgatttaggctatgttcgctccagcgtgttccgaaaaacagaacgatccattagcatataattaattaagtattagctaattattttttaaacatgatcaatatgatttttttaatcaactttcgtacaaaaacttcttaaaaaaacgcaccgtttagccgtttaaaaagcgtgcgcgcggaaaacattgaagatgagttgagatacctagggtaagaacacggccttagtattggatgtttccttcccttatatagtttcttacgtagtgtccgtttcctgtccgtttcgtaaatattttttttatatctaccaatggtagtgtccgttttgtaaatattttttttataattaccaatggtctttgagaaactctaatatatttcacaaaagatatacctatgtacaaattttctctgaatcgtttctcgttagttttatactccctctaattcatattataagtcgtttgactattttcctgattaaattttattagatttgatcaagtttacagaaatatttagcaacatctaaaatatcacattattatttttattaaatctcacataatatgtttattttgtcttgaaagtactattattttttctataaacaacttataaaaggaaacagagggagtagtaactgtttttgttgttatcgtcaaacttaaatttatttggtattaacacatgcaatgagggaaaaatgtcttattctaaattgggaaaaaaacaattatagccaaaagcttgaggataaagacactccctcatacacgatgtgtcataggtaaacaacaaatatatgaaaccgtcaattctttaggataaaaaatcatactcttgtaaaccaattctaaaaattcagcttgccacatatacacacaaaatgacatacaaaaccaaaatgtcacatcacatatatagaaaacaaatacctaaaaacttggatattccaaccacaccaaacttcttcgccaacagcttccatattttagacatgacatatatgccgtgcaaacgaaaaagatttactctacagcaggcaaggagaaaaggggagatacacgagataaaagtcagtggcctgagagagtgaaaggctgaaactcgagcacaacccaacactgccagcagaaaaaactgaaaaaaccagaaaagccaatggtcaccaaccccaacaaaaaagcgagcgaccaatgcgatgggggttccgtaaaatcccatccccttcccaccctacccaaacacccgctggtataatggggttggtaaacgacgttgacgtggcacccctgccccagtcaacgaaccccccctccctctcaccaacccaatgctcctctcgcttacaggtgggtcccacacgtcatcctctccgggccccgctcaccaactccccccaactcccttctccctcccgctcccgccagtatttaacccctcccaccttccattcctcccctctccaggagacctcgccgccgatcgatcaatcgccgccgccgtctcctcgtgtaaccctagcttagtggattagtttaagtgtttgccggagattatggggtcggtggcggcggaggaggtggtggtgttccggtcgaagctgccggacatcgagatcgacaacagcatgacgctgcaggagtactgcttcgcgaggatggcggaggtcggggcgcggccgtgcctgatcgacgggcagaccggggagtcgtacacgtacgcggaggtggagtccgcgtcgcggcgcgccgcggcggggctccggcggatgggggtgggcaagggcgacgtggtgatgagcctcctccgcaactgccccgagttcgccttctccttcctcggcgcggccaggctgggcgccgccaccacgacggcgaacccgttctacacgccgcacgaggtccaccgccaggcggaggccgcgggcgccagggtgatcgtcaccgaggcgtgcgccgtcgagaaggtgcgggagttcgccgcggagaggggcgtccccgtggtcaccgtggacggcgcgttcgacggctgcgtggagttccgcgaggtgctcgccgcggaggagctcgacgccgacgccgacgtccaccccgacgacgtcgtcgccctcccctactcctccggcaccaccggcctccccaagggcgtcatgctcacccaccgcagcctcatcaccagcgtcgcccagcaggtgagccctccatgaatccctctcctccttcttctctgctctactctgcttccatttccgtcgtttccgagtccgggaagctgagctcgcagtagctgacatgtgggccccaccgccagctcggtggggcccacatgtcagactatctgagggatgttctgttcccattttggataactcggtgatcaagcgagcaggggccggctgggttggattattcggatttgtttcgatttggcgttacatatgcgctgtgcttgtgtccgtagatttgttcacttgtgtgcaactgtgagctactactactggtaatagtgttatgctgctcggtgtggggcccacctcccacaggcatcgtcacctaacaacggtgtctggttgtggcccctgcgtcaagattcgtgcatggtcatccatgagttttggcgccaacggccaagctatttcaaacatgagttaatatagtattatcgagtagtaactaaacgtgatcaaattttcattctttttttggttcatgaaggtggatggagagaaccctaacctgtacttcagcaaggatgatgttatactatgcctgctgccactgttccacatctactcgctcaactccgtgctgctggctggcctgcgtgccgggtcgaccatcgtgatcatgcggaagtttgatcttggcgcgctcgtcgaccttgtgcgcaagcacaacatcaccatcgcccccttcgtgccccccatcgtggtggagatcgccaagagcccccgcgtcaccgcggaggacctcgcctccatccgcatggtcatgtccggtgccgcgcccatggggaaggaccttcaggatgcattcatggccaagatccccaatgccgtcctcggacaggtaaattgatgccacattacaatcattgcgcggacgaaaacaaaatctcctctctctctctttttttttgagtcactgacaagttagtccgtcatatcccttcttctttagggttacggtatgactgaggctgggccagtgctggcaatgtgcctggcgtttgccaaggagcccttcaaggttaagtccgggtcgtgcggtacagtggtgcgcaacgcggagctgaagatcgtcgaccccgacaccggcacctccctcggccggaaccagtccggcgagatctgcatccgcggagaacagatcatgaaaggtacacacatcacccacccccacccaggccaaaccctccattgatctctagataggatgtcaataccctgacgctgacgtggcgcaaaacgacacaaggccgttggacactcgcctctcccactgttgggtgggcccggggtggcgacttctctcccgcacacttggctttcaggtcgtacatggcgtcttgctgcgagctgagtgaacaaacttgctgcagcttaatttggtgcataggttggaaaccaactcgtttggtcccctgcgattaggccaaaacacatgtttttacatgcgacgatgagtcgtcgtcgtgattttggattggtctctaccaagccacaaacgtggtagtctagctgccagtaccagtagggtaggttccagtttccaccgactgaatctgaattctttcggagaaattctgtgcaaaaccagctgaaaaatcgatatcgtctccgatttctttgaacagaggaaggttctgattctttttttttttttggcttttgaaacgtggttagtggctgatgttgaggggtcggaatttcccgtactggaaacagttgaggtgttgctgattaggtggttcgttgggagatcctttttattaaaaaagaagtggacagattagtggtttggtccaagctccatggcgatgattgcctgaacagctgagagaggagagaggaatttccgtccactccacgtctttttttctctgatttatttgtggtagcagtgacctcgcgtggttgttggcacgcaccagctcgcatcctagcttgcagccacacaacgacgcacgttgctactgcaaaatcatgctcatcatcatcatcgcagtggcacgatcctggaatccaagttgcgatgcttcttcaagcagatgaaagaatgggggaaaagagagagagagagagagagattagagcaagtgtgtctgccacatggatgatctgaagatcagaaaattcaggaagtgaggttccactaatgtttgttttcgcaatgcgtttttggacaaggcattattgcaattaggaacctggcaggtcaaaggcttttgggtgaggcgaacatgggcattggcaatttaggcttatgcgtctagtatgcgtgtgttcggtagtgggcttatagttggacatgacatcaagcaaaggagaagtggcagcttatcctgaccgtatcttatctcagttctcaccatgtggatgtcatgtccattgttcacaacttattttttctgaagatttcttcttttgaggacttgttctgaacctgtttctctgaagaactgttctgaacttgtttctctgaagaactgttctgaacttgtttctctgaagaactgttctgaacttctaattgattggatatttagttggcatagtcaaacctgtactacttacatggtacacaataaattatgtctactggttttaaaatggttgatgttgtcatgcgggccaggagacagctggtaccggttaattagaacgagatgttttctttttctaagcctttcctttcaagttcctttcagaagtttgttaggttctagtttacctatcaacggatcattggttggtatctgcttggcgtgcaaagtggagatcacatcaatttcagtcgccagccatgcttcagttctcctgcatctttctgttcatcaaccactactataatgaaacccaaaccaaaccaaacacccaaagcttagctagtcttctagtattaatcaataccacaccatcatgtgaagcaagtgtcaccatcacataatgcaggattagcatggacatggcatctcaagtaccaagttgaataaggaggtatccaattagcactgctgcatctcagaaagcattgcacaattcatagttagaacaggccaaatgagtggtccatcaacctaattgctgtcactggcttggaaatgtttggtggcccatcatgtgaaattgtgaacaagaaaagccacagttgggtgactgctccagttgctcaaagtccagcctgaaaatcaatcaaagaaagatggcaatggcgtcacaagtcaatcctaacctttgtcccattaaatttgaagagtctatctgaccaaaccaaactctagttggtacagtaggtacaaatcccaagactctttggtttggttgatggatgcagccgccagcatcctggatatctttgtgaagtttttacctttttttttactttgaataaaacttagaattctaccagtgctgcaaaaacaacagaaaattcagaaaatgattgccacttcaatgctggcaccaaacaagaatcacctgaaaaataagttcagtaccctgccaattgccatgtgcatgtacacatctgaaaaccaatgactctccttgacgttaacagttacagcttagctctgccatgtgcgtgcatgcactgatgcaaagctggatccgatgtttcctttggattatttgatctgcagtacagaattttgtcaccactgaaactgtcttctccttcagaaacagcaggaaatgattcttggccgtactgacgagctgtggggaattttgcaggctatctgaatgatcctgaggcgaccaagaacaccatcgacgaggacgggtggctgcacaccggagacatcggcttcgtcgacgacgacgacgagatcttcatcgtggacaggctcaaggagatcatcaagtacaaggggttccaggtgccaccggccgagctggaggcgctgctcatcactcacccggagatcaaggacgccgccgtcgtctcgtgagtccatctctgatgaaattcgccattgattaatcgcgagagaatgtagtgaactgtcactgattcagttgctggtgaaacttgttttcaggatgaaggatgatcttgccggtgaagtgccagtcgccttcattgtccggacagaaggctcagaaatcaccgaggatgagatcaagaaattcgttgcaaaagaggtactaatcacatgcaaatgacagcaacaaggattctgatttaaatcttgctaaaatttttctgacacgtttgcaacaggtggtgttctacaagaggatcaacaaggtgttcttcaccgattccatccccaagaacccttccggcaagatcctcaggaaggacttgagagccaggctcgccgccggcatccccgacgccgtcgccgccgccgccgccgatgcgcccaaaagcagctaaggccaacgccgacgttttctctattttcagtcacacaaccggtgaaaaaaaaatgcagagatatgatgttgctgtccatgaaaatggaggcagaaatggagcagaggaagtttatagtttggtttgttggttggttgatgctgctgcagcagcttgtgcaatgttcataaaatggcattaataatattattattattattatacatagatgatgtattgtttttgaccataagaacaaggctgattacaaaataatacagtgtattaattacgccctgtttctctctactttggagattccagatgcttccttttacacttggcctagtttcggaccaaaaaaatgggtgaaatttgattgcatttgagtggcatttcagggagaaaattattttctggaacatatgcttttgaaaaaggccccagtatttgagtatttcaacctcaaaatggagctggcccactatatttcacgtgaagcccaagagacatcgaggcccatgtaaggcacagtaaacgggccatttcgaagggaaagcctcacggtcgttggcctcgtttggtttcatggccataccatttgtgcaacaattggctaaccattttccaaacaaaattcagttttgaagaacaaatacctgcaaaaatttcacctccctccatttttcatataaccgaaatctatgataaggcaataggcagactattgatttgtctatagttagggctacatagtttgtgaatgttcttttcaaattatgcaacagattatttgcttcacattcaaaaaatatgtttttttcaaaaaaaaatagagactttcttccactgggtagtgtttgaatatcctgaaaataaagatgaagataaagattaagtgtttcacgtaaaatgaggtggtaataatatgtgattaattgagtaactcttacaaacttgaaaaatgaattaatctgatagtttagaacaactttcacataaaaagttttcgcacgaaacacaccgtttaacagtttgaaaagcgtgtcattttaatacaaaatttcatccactcttttcagtggattcgaacggggcctcgtgaattgataagaccaagtaatctgttaagtttctttctcaaaatttttaatttatctataaaactaaatagataatccgtgactcttaaattcttaataatctacaataaactgggtatggtagattggtaggtagctagtcgaggaatcaggacttcttctgtcacctatttatttctctagtcaaaggtttgctatctatcacctattttatttctcttcctttcgattgtatatgatctatgtagtgaaagtgagatcaaaaaacaaaattggagttcataacttttttatttttgctcttccattatctgaaaacttacatagtctgcaatgtcagacgttgctaaaaagcagccatacgtagcttcaaattacatatgtacttgctggcctcctatagctagtagctataattctgagatgtatctgaacatacttatattcagattcatctctatctctagaattagagatttctagtgcggagaggtagctagtactgccgcgcgcgggcagctgcggcggtggccggccggcgagtagaggcggaagaggcggcgggcggagaaggcggagaggacggccatgccggcggcggcgaggaagctgcagagcatgccggcggcggcctgctcgcagaagcgggtgtagatgttgcagagcttgctccactgcaaggcctccacgccgatcagccccaccatacacgcctgcagcgccgccgccgtgctcgcgaacaccacgtacgcgcatccctgcgtgcatcaccaaatcgatcacaatgggaagaaacaaaacaaactcatgatcaattacaaatcgctattatgctggtttttttttctagctagctagctaccacttgaccaacaagttggattcttaattaattttactgcaagagttttccaccatggaacttgaagtcaagtactacctccatcgtgctataatataaacttttagcgttgacacgagtattaataaaatatttaaaattcaataagaaaatattgtgagtggtcgataagtagaagcctacgagaaaatcgaatggtgaaaagttatgtttggttgaaaagataacattgatcgagacgtcattatattttaagataaattatatttcctccgtcttaaaatataagaatctagaactggacgagacatttcctagacagagaattgttctatccgattttaggttcttgtatttgtattttagaaccgattttaggttcttgtatttgtattttagaacggagagagtaaggatggattgaataaaatatattttgaagaaaagatcgatgtggactagaagctttttttttctgcatttaattataatgagtactaattaataaagaagacgaagacgacggcaggtagagggcgctttgctatctaattatctatatatcgcgataattccagatgatatgatattgcgcattaatggaaacagttgggagaaccagccatttgctcaatcaccctgttccttcttttctggagtcctcagcctcactcatgttcgacgcatgtgttccactgtttcatccctatcttgacgatcttaacttcaagaggatcgcatcatatcatgcgttacatccgatgacaacgactcaccttgtcgagcaggaaagatgtccacgccaccgccatggcgccggcgtcgccggaggaggagcagtacatgcacctgacgagctgcgcgaattggtaccccgccgccgccgccgccgccacggtgagcaccctgcagatgccgcgagtgtgtgcatgagtcgatcgatcggtctccgccatggaaggcgccatggatgcacggagctatacgtaccagagggcttggacgtccttggcgacggcggtcttgcggacgaagagcaccgtcttggtctcggcgctgaacccgaggagcagcgccgccgtcgccgccatcaccacgcacccgccgcgcaggagcctctccgccctcaccacccccggcaccgccgccgccgccgtcgtcgccgccatggctgcaggatcggacagcgactagctatgctcgatcgatcgatcgatcggaggttggtggcgtggcgccgttggcaatggccaatggcaatggcgtcgtcgcggctcactagctatataggcgcgagacgcgtgcgccatgggcgaacggcgcagggccgatccgcgcgcatacgtggcgagatctgggtcgcacgtacgttaggaagtcgtgcgttgcagaggcttttgcagctgttgcctgttggtaaggtggggcccacttgccagcgaggctattcattcataaaagctttaattgtggccggttttctttatgtagtgctcactccatgtcatcgtattgcaagacgctttgatttttagaccagtaattttttttaagattttaacaagattatacgaaaaatataagtatttttaacataaaaaatatattatcaaaatatattcaattttagaatcaaactaattttgttttagatgtttgctaaacttttttatgatttggtcaaaattaaaaatatttgattaggaaaaaagtaaaagcgacttagtctgcgttcgggagtgagagttccctcactctctggcacgaaaaacggagcagcgattagcgcgtgattaattaagtatttgctattttttttcaaaaatagattaatatgattttttaagcaactttcgtatagaatttttttttttgcaaaaaatacatcgtttagcagtttgaaaagcgtgcgtgcggaaaagagggaagctgggaacctttagtatcgatcgcagccttatagtatgaaaaagatggaaagggatggagtatgcaaacagttagccagctagagaccttaattatggcttcaaaaataatacttaaatgtataaatatagtatgtgagtgatcaatcgatgtcgaaggtctaaattatatgagatgataagtataataatttcctcaaaaaacacgcaataggttttagcggtaattagggagaagtagaaagttttgaaaaggaattggatatggtggtgacttgataatctgagcatgttgggtaaggcaatggagccatctggactataatctgcttttctcacattgactagtcaggtaaccttctatggctgcagacttcaatggtgatcactcataaaagcttcaaccgtcaggaatgcgatgggttgccagcaaatccaacgtcaactacacatacgtattcttcgaataaaaatgttcaacctcacctaaggtttattggaaacttttgatggctgtagcttttttaaaaactttttcaaacagtataagtattttatctaaattctaagatgctgccgttgtagttgtcgagttgaaaaaatgtactataaattaatcataatatggttttctcatattctcgctagctggattataactaactgcttgctagaatctaaagttcccaaacagatcatagtacgttgtgatatgaaattgaaaagaaattagttatttctcattgattaattgtaggagaggggaaattgataatattcaattaatcaccacatatagcactctatagatcagtttattggtagtacatactactccccccgtcccataatataagggattttaagtttttgtttgtaacgtttgaccactcgtcttattcaaaaatttttaaaattattatttattttatttgtgacttactttattatctacagtactttaagcataactttttattttttatatttgcgaaaaaattttgaataagacgagtggtcaaacgttgtaaataaaaactcaaaatcccttatattgtggaacggatgaagtactatatagtaccttttcattttccagctgctaaacataacagtgcgcacgtttaagttatactccacatcatgtcgatttcttgcatttattgatgagatgatcggtcaagtagatattggagttctggccggatggaagttgtaagttcatctcacatcttgtatgtgaagattctcttgatgagtaatgaaattccctttgccccaaaaagaaaaatagatattggagtagatcgatctactactgtactggcagatgcttgctttgtttcttctttcgtttaaagaaaaaaaaaagcaaaagtttctcctattgtaatccatgtcaggatgccattattttagtcaacattattatgctttaaacaatttcagttaacattaaatcaggtgctcacttacccctccggtttttcaatacgtttgactttatcattagtactactttaagcatgattcatattttcatattgacactaagttttaaataaaacgaatatatcaaaagctaatagcgtcattttacgtttttgttgcatagagaagcaagatctactagattaaaagagagagagagaagaaagatctaggactagcctgtgtgccaaatgttacctccattcaaagttttttttcggagaacctcaatccaaagtttgaactagtgctaatcaatctacttgcatctactcctagatcccaactgtccaattattgcatcgtttctttaatttaggcctctcccttcgtgtacgtgtttgtactcttctccatctattatttggatgacacaaaacagctgggtcaaaggattttcagaagatttgtttatgaattaaattggtttttttaataaaaatcctataaaattcacgtgttctaatttctaaataatggagggaatttgacttgacgacctcctcatttttcagtgagaggggttgtgatttgtgaaaaacaagagacatcaagcaaatacttccatttcgagttatgacttatgaaacgatctagccagtgcaaatatatggcccttccataaggaccaatttgacattaacttctttgctgaacatttcacattaatgcaagcaaagggaagcaggagtatgaactgagcataccttatctggttagctaccttatcatgaaatctattaatctgaatttaagtcctaggtaaacacacttacaactattgttctttcagcgattctctgtcgtaactccgtcgaaatatgttagatcaatttcttagaaccaatcgctactggcactgcagttgatgaatgtcgctactctgtagtaactttatccatccaaattccgttccacagcataagaaattttggatggataagacacattctaaacaattcgtagtattcagatgtattatatctatttaaaattgtttatatcttagaacggagggagttcgcttgaacaaatcaccagctcttccagcacttggaaggaccaaaagggagagtaattagagactttgtgcgcagcaaaatcgtcatcagtgatttgtcgtgtccgttgatcatccattgtgttctgcaccatgagattcacaaaacggtggtgattgctgaaacataagctgaccccaagcagagattacaccgtctcaattaaggccctatttaattcagcttaggattattataatctagattattaggagtaagctgaaacaaacaagtagattattatgctagattattataatctataagccagattactataatccaataatctcctctagtggagctttttctagattattgagtggctaaagacccactacccttagatgcctctaataatccagataaacaaacaactcgtagcttattttatatcagcttattataatccagcttagagtaatctgatttaataatctagattacaataattttaagctgaaacaaacaggaccgcggtcggagaattgaactccgtcgtcatcactcgtcagggagcctcgcccagctcatccaacggccaacgccggcctaaactgaaaccggctaacggtgattaaaggacttgatggaacaccaagcttctttccgcataaaaggactagttaattactatgatggcaactgaaagtgaaggcgaggacagggcgcaatctggcgataattctgtatttatatgatgcagcattgccccattctgccgctcgaatctcatgctcccatcttttcagggctcatgtgcggcgtgccatgcaggaattttgttggattttatggatcaattcaatccccgcggaatttcttacttcctccgtttaggaatataagaattttttagtatagtgtcaaatcaaccatttttaactttaactattaatagaaaaaaatatcaatcatgtaaaattgatgttactagatttattatcattagtcaaactattataatatgcaactattttatttaaaacattttatttttatagatattgttggtcatgtcgaagttaaaaaatacttatattttaggatggaggaggtagaaaagaacccccatctcgtagcaaactaacctatgaaatatacgactctttcgtatgaacctccagtcacattgttgccaacgtaccagatcaaattctaaacattgcaaaaatagatgtcctacaggtaacacatcggccatacacatactatccgcgttaattcacattgttttgtttataatctgcacaatctataacaaacgaggaaaataaaatggtacgcaaacatttcagatgtttttacaacaaagcagaactacccgctgtacataatcggttggtttgtttcaatgcctttcaaggcagcatgagtcccaaaacctagtttagagcatctgatggtattaacatttcaacattaatagcatctaacggtagccaatacacgcttaacatgttgttaatcatccagctcaacaagctgcgcccttctttcggcagctttcttcctgacgaaaatcccccatctcatggcggcctttatcttgagccacccaacaacagctttcccagatgaacgggtgcgctcaccttcgaacccaaggtttggtaatggagatggcatgtacgtcgggaagccgaaggcgtcttcctgcaaactggtagacgctccacccatgctgaagaccctgagcagctgctgcatgtcttcgctctcgagcatttggtggcttttcatgcgaatatcttcggtgaagtcatcagcgaactgaccgttttgacttcgagtccaatcatcatagccaacatttgctggctgaatcgactgactctgtgaaattgcttgttgcaattggcctagttccaggcccatgccatcatttccggtttcttgattatcagaccccatcaacatactaggcggtaaaaatgaaaaggtgtcatcgtatggcacagggacattggcagatgtactttgaagttgagatggctgtgtagctgcttggttgccatcataccctatggaatcagttccagttccacttcctcctgaaatgaatgaaactagcatggtgttcagagactcttctatagtgacaaatcacgcgccctatagttcatctgtttattctaaaagtgtaagcaacgttttagggtttcaaccatattaattactaccaccccatccccaaatataagggattctagagtcttttggagattaaggatgagagaaaaagacgatgatgcccctcaataaatgagggggagttggggagcgggagggtggttaaggtaggattgggtgaaaattaaatgaggggtgattggatgggacaggtagtactacaaaatcccttatattcggggacaaaatttgaattattcgatgtcttatatttggggacggagagagtatatttctagctgtcaactaaaataacaaagaggtactaacatagaaatggtagataataactcatgcttctaacctgctggagatggtcctgtcatgctcgctgatgagatgcgttgttcgtatgaagcaggttgactcagaggaggatgtgtctcaacgtgtccagtgggtgcagcctttttcttcggtttagagttcaagagagctttaccatcatattcaatggcatacatccaattatcatatgccttcttaaccaatgcatcagcaaagagctgtaatgaacaataccatcccaatcagtcaatatggtattaaaaacgaatagcttaaagttctcaaaagctcatgcagagaataaataaagcatagctcttaattcttaaacatgcaagtgtagtgctacaagcttagattttacacagaagaatacagtgaatataaggctgagttttatttcattaaatagtggttattcttaatgatttatcaatgtcttctgtactgatgtttggggagttgtacagtgacacatcctttaaaaaataaaaatggcaggactacaggggcactctctattcactaagtgccaaaggaagtttactgcaacaatcgattggcagacaggaggtcagaagaccttaggaacaaaagaacagctgacacatgatgaggcaccaatgcaactaacccaagtattcttgggtcatcgtagcacaaaacacttgatacaccttattccagttcatagcatgcgctacaatataagagaaggggtgtgtgcgtgacctacatcaacgcactaacataatataaagttcaaagtacacattattatcacccctccctaacttatttacaaaaataaccctttaggctgtccggccatgctagtatgcaaccagtcaggtgtagcaaatgaacattgatacgccaacagttctcactttttattaataaatgaaacctttaaccacgccacgtagcaaaacaacactgccactatgttggtggccatgcctaaaagggttcgctgtccagaataaaatgtgacaaaaggaaagctatgcaaccaagcattttttattgcttttgtgttacatgagtgcatctttaaatgaatggaaataccattcaagtttgacattagaagacaacttaaggaccacgacatacacacacaacaaaaaggattacaacaatgcgtggtttagcagaaatcccaacgaaatcccatggcattgcaaatgaaaatttcaaaagttttatggtttcctgacttgtttctgtgaccatggctcattcagtttgctgtccacatgcattcattagcatggttaaatgctttaatctttatcagtctagaagccttacagagtcaaacagattaactctaactaatgtatcatcttataattatgcatgtgaatggagaacgaagagcaaaatcacatatgtcatgaccacgtaagggtacgattgtcattttattggtggcacatgtagttttggttgccgtggtttcattcttggatatagccatgtagacaggcatgttagacaagtttccataagaaaattttggtatgaattatgtcttccaaaaacagccaacataatatatgcatcgttatcaatgtgcactactataaccaaccttttggctatcatcaagactttcagatgaatagaactgctcgccagaaatcaacccacagaatgcatagatgttgttgaaaatagcaccaatagatctattctcgtctgaataatatatgtaatattttccacttaagacacaagtctttgcatgttcgacaagaatatcccacatcttattagacataccacttccaaggatctgggacagaacatatatgttagaactcaaacaaaagaaaaaaagaagaaaaatgctgaataggaaataatcttacactgcgcaacttctgaggatctcgaaccacaagcctaaggaagtcttcaactgtagaaattccagctttgttcagtctcttatggaaagatccatccttccctatcttttctaacctccagacctcatctttcaacgcaggtgggtagtgcttcttatacactaatcaaatgaaattcaaacagttaatagaaatatcatgaagaatcgtatcatatcatggttgcttcagaggacttacattctcctctgtggtccttaaccatgaaagcttcagtttttgcctcgcggatgcgaataccctcacaaaatcctgaggaaattttcaaaccaagtcggaacttccgactccttatccagctagagttatctgtgaatgtaagctcccctacagtgccaacaccttcttttagtgtgacttgtacatcaccagttaaaagagggcgctttccttcacgctctttcactacatgactttcaaactcttctcccgaccatccctcctcatcttcattgttgaaatcaccttctagaacaacaatgtcaagtttggcacatgactcgggtccagaagatacaacacaaccagttccagcatcaagcaaaacaacatgaattgcggctccctgctccccttcaacttttcctccagtaaaaagaggaagagacagtcttgtcctgaactggagttgcagatttcttccatcaggaccttcaattcgcttcggggaagacctgaattattccaacagtagcaaaatatatatatatatatatatatatatatatatatatatatatatatatatatcaatgtgggttctaccaaaggttgttgtaggtttacgtgcttcattttaacagttataatctagcccagatatcctaaaacaagcaataggttacttgtgaaaagaactagcaacaagcatcatgaacaagcacagctaacaaaaggttattttgtatcatatgcaatttgatggtaggagttgcagcaatataacttcaacggttagttcgatgtactgctggattatattatacaaggaagtgtgtgaaacaataaattcatagtcaactaagcgatagaacagagtaccttccagttattgttgcaggacccagtctgcccaacgcacgctccacttcttcactaacctagtatgtatacagagaatatatataaccgaatgtaactaagtgcaagaaataattaacagtagtgaaggaacatataaatgtagacagtagcatgctagaataaacctatgcaaaaaaaaagagagtaaagcgacatgataatagaattccgcttaaaagagaattgctttgttcttaccactctacgaagaattggttccagtgatgagcaaagcctctgcagactatccacctttaatgcttcaacaataacactgcagagaaagaggcgaagcggaaaaaatcatgacagaagaacaaaagacgcaattcaccttctcacatgttgagctttacagtaatgaacacgcaagggaaacatgtttgaaaaaaactgtaatcaaaactaccagaaataagtaattgaccattattaaatgatgtgcagaaataaaagaaaaaacctataaagacattcattaaaaccatggtagtcaaatttgacaactgacagaccataaatcagcatcaaaagatcagtacacttcatagccatctactgtactagcatttgcgaacagatccatgattaaaaacaaatgcaaataagtcacagatgctggttgttacaaaaatactaacactattattgcagagaccatagatgaggattattttgttagatagtggaaatgtgtttcacacctgctgacttctgcacaagcacattagcacagaaaagaacagttgggaaaagctatctctaaaaggtagtacaaccccaaatcctgaaacagtcatttggatccatcctataacatacagataggggttggtcaacagtatcactattagtaacactaacagtgccgagtgccgacctaagaccaaaatttgtcacagaaggataaaaattctactgatgggtcagagtacaaacttactaagatttctggcatttccctgacagatcacacaccacctttctaaaagaaattttgcagcatcatgtctacatatgctcaaattacacaccgcaactaagcagtaaactaaatcaaaccactcccaattctcgatcgagcactactgcaggagtaaccctaaccctactatggctagcatcccaaacatatctcgaggctagaaacggaaagaaagatcaaaaccgcggaaaattttcccctcacctggccagtgcgggaggccgcgcgcgcttggcctcggggtggccgtcgccaccggccgccgcggcttccagcccgcgcttctccttcatcgcgcgcccccaaatctgcaaccgaaacgagcacaacccgcgtcagattccgccacccttttccgcaatttgacatgcgtgaaggaaagcgaagagggatccggtcacctcgcctaggctggggacgccggattcggcggcggcggcggcggagggatcgcgggggaggggaggaggcgtcggcgggggaggcaggattctttgcaagaagagagatagagataccataccagccactaaaaggcgctgctcttttgccaaatggacctccgcatttgttggttttacatgcaagtccatcaagaggagttctgttacgcaaacgaaccccctcagctccgatcttaggttttcgccggtggcggagccaagagatgtcgtgaagcctggacgagtattagtgttttctggtaatcgactaatcttttcggacatcggagactatctacaatggagacgctagttgcagagcctgggcagccatccgaactgctcgggagctacctttgccgctggttgtcataaaatgtacacctaagtttttaggttttgtctttgtaaatgtgtaaagcaaataaaacccctaaaataagctacattgaagatttttggactagagttaatggtttttttttgtgttgaagatagttttttttcatgataataccgtatcatgtgacgttagtatgttgtagattatttgtagttaaatttttcacacattatccttatttttggtatgacttgtcgtaattagagaaatattgcatgtttttaaattaaagttgtatatgtccaactctacatcacattattccccttgtattgtttttgaacaccacttagcttaggggtttaaagttggatataaaaaaacaccttattgttatctcctcagtcgcactagaatacattttttatgactaaatcatatgcacaaatgcatcacaacaacacatattagtgaagtccctttttttcccttttgaacgatactccctttgtcccataatataagagattttggatgggtgtaacacatcttagcacaatgaatctggacagatcgtctgtccagattcattgaactatatatatcatatctactcataatcccttatattatggaacggagcaagtaaaagtaaagcggacatgtttgttagttgcaaattttgcaccccgtagtcctaaactaaaccatcccatcttgctcatgtaccatagaaagttgtatcttgtttagtagctcatacatggatattcctggacagtttgatcagaaaattatgcgccttttacaggccataacaactaaaactacacaatttccatacaattttcgccgaaaacaaaataaaactgtatggatcagtttcccgaaataccccatcttagaggtgctaaaatgcaaaccgctgcgagaactgcagagaaaaacgccaccccgaccacgcgaactgggctctgatatccatacatccccacccagtacatcaccgacacaacgggcccacgaaaggccgggcccacctcacatagacacacagggatgggtgtagcgccgcgtgcacgtgctcgtcgccggtgggcccgcggagacagtgacgtcgccgtctgggttggggggtgacgtggttttgggcagacggcgggtgggtgatctttttgcagggttaagtttaaggggataagataatgattcgcgccatgtgattagtacagctcgagggaatatttaatcaaaccccaagtggatcctggccccatctgcccaacttgcaaatttaaaatgtctttatcgtggaacaactttatatattttctcttttttttggcgaagagctttaggccctttttttgaatcagagatccggcaagaaatttcatataagttgtatagaacaattcatgtttacactttagagctcgaaaagattgacggagccgttatatttgcaaatgaaatgtaatttgtgaataaaatttttatatacgtgttcttaataatctaaaagaaaaatcagctctaaatttaaggttgaaaatttaaaatttggctgataagcataaacataagtgaagagatggggccggaagctttcaaaattctagaacaaaatggcctagtgcataaatattttggaaaaaaattaacaactgaaccatcagaaaaattccctcaaagtttatattgctataattcaattccggtgattttatatcgtgatcaattgtgcctgtattttttatattgtattcccttattctaaaatacgtacctccatgttaccacaagtgaatcacatcatccattctttctataaagctaatgcctactaaacaaataaaaatctcaacatgcaagcataatatttattagtactcctagattctatatgcaagcatgtcacaccaaccattaaacacacatgctaaacatacaagcatatagtaataatatctatgatttatttcattctaaaattaaacatacacatgctaatacaccattctcaaattagtttcataatatttcaatctaaatcatatcatcatttctccaaagcgcgggcatcatctgattttattagcgttcaagacccacgctctacccatattatcccttaattccatcaacctctatatatctttaaacatttcacttcaatctttaactcttctaaacactcacagttaactaaaatatatgtactgtcttatctatttatctctatttcatcattcttgtgctctaaataatacttcctccgtttcacaatgtaagtcattgtagcatttctctatattcattaacatcaatatgaatgtggaaaatgctataatggtttacattgtgaaacggaggaagttcatatacttcctccgttttacaatataagtcattctagcatttctcacatttatattgatgttaatgaatttagatagtgtgggaaatactaaaatgacttacattgtaaaacggagggagtagttgttttatcgaattactcttgtcaacccaaaaatatctaaatctaaatatatacgttaactatgtcagtaacttataccagattaattgggaaaaattgaacactttggcaaatccaaagtgaactttcgaacaccgaagaattgcgatttcaaatgtttttcacacgattttccttttcaatggagcagtagtagtaacagctacctgaccggtgggcccgggcatccggatcagatcaaaccgaaaccaaaatcccaaaaaaaaaaaaacacgaggcgcaggcgaagcccacgtggacgaacaccctcctccccccgacgaccgccggccgccgccgttatcatgccccccggcggcgggggcgccgtcttcctcggagtcgacgtcggcaccggcagcgctcgcgcaggcccgtcatcctatcccccccactttgaagtttgaacccccacctcttcttcgctttgagatagtcgcatatgcgtttctggatttagctgttcagtggtagtggagatgcttttgtttttttggagtgcggaattcggaatcggagaagaaattgaatgtccagtgatgaggaaagttgattgtttcgtcgtctgaaaaattaaaaagagaaaacgataggtttcatggggaaaatggtagtatgaattatgcgagaatttgctgtggtggaagggggatattgcagggatacgtgttcagtgaatttatttcctacagtggacgtgtttaaaattcagttggtgtatgcacaagaggcatgaacttactaatatgttcttaatttaaattcattcaggtctctttgatgagaagggtaagctgctggggtcggcgagcagtcctatacagatatggaaggagaaggactgcatcgaggttgaggagattatgttctaatccatccgatgtattgcatgatactgagttgtactgtattgctaattctggactgtttttgaacttttcatcaccagcaatcatcaacagacatatggcatgccgtgtgtgctgcggtaaaacacgcatgctctctggcaaatgttgcgcctgagaatgttgtcggacttggcttcgccgctacttgttctcttggtttgctcttatctccgtagtagatgcttgcatgacttgtcaaggatttcattggcttgatcaaacgggatgctgcttgcagttgctgttgatgctgatggttcccctgtttctgtttcttggactggtgatgcgaggaggaacatcatcgtgtggatggaccatagggctgtagaccaagctgagcgaatcaatgctcgcaattcgccggtattgcaatactgtggtgggggtgtttccccagaaatgcaagccccaaaggtaatcggtgtcctttcattgctcatgcatatgatacttcaattgttgtactagtttttagcttcctgttccacccattagtaaaaactgctgaacatgctcctgtcgaccattgtattcattgcctggttgcacttagttgtcagttgttgggctgcatattagaaaactgaatggtccaatcagggaacaagtgctaggacaaacactggtagggaaaaacctaacattaaaatgctaaagacctccatgcgtggtgacaatttagcatatgcatagtttctgtgtggaacatatcaactttttgaaggtttgatggaaagtggtgtcatgcccacttctcttgctggccttagtaaagcttttctcttgaccacaatgctcacttgtttatgttactgaagtccaatcatttttgcttcttcaccaaatttgctctatgagaatggaggtggcgttaatcacgtgatgggcatggatagtgatttagattcagtcactattttttaggatgggattagttattaaaattgctatgaatacatatgcgtagtttggccttttcacaattttgtactgagaaatggggaggcacttatattgatgtgcattatctgattgtacagctcttatgggtaaaggaaaatctgcaagagtcgtggtcaatggtatgtaggtggatggacctcagtgattggttagcatataggtgagagttctggatataatttgtgtggttctttttttctcattacatatgtattgacttgtagcatgttctgttttggcaatccttttttagagcgactggcgatgacacacgcagcttatgcacaactgtttgcaaatggacatatcttgggcatgcacacatggaacagtggaaggaatcagattcacgtgatatggaagcatgtggatgggatgaagtcttttgggaagaaataggcttgggagaccttgttgaaggaaatcatgcaaaaataggttgagtgcttacactttctccatttggtgctaaatcggcataccatttcatgattttcagatacagactaattttctacgcaaaccaaacaggacgcagtgttgcatttcctggccatcctctgggttctgggttgacagctactgctgccaaggcaagcaactagtctgctcattttctaaaagtgatgttattaaagttgaattatgtgaaatgcactattttttttcttattatctaggtcaccaagtttgttgcctactgttcttatgttggaagaaatgtctgaagttatttctcagtatttattttttatgtttgtttcctccaattctcaggagttaggtttgcgtcctgggattcctgttggaacttcactaattgatgctcatgctggtggtgttggagtcatggaaagtgtgccagatgcagaatctaaagctgacagtcagtgttggtttatctgtatttttctaaagaaatcagttctagaactttatattcatgtgttgtgaaacatttctatttcagcgtctgatgaatctgatgaacaagctatatgccaccgcatggtcttggtttgtgggacatctacatgccatatggctgtctcaaagaacaaactgtttatccctggtgtctgggggccattttggtctggtatagtttccttctcggatcacatatttacttccactccatatagttcttgccaggatctctgttattttgtttccgtacttgattttctgctatcgttggtgagcatggtcaataattgttatcatgatttcatattcagcaatggttcctgagttttggctcacggaaggtggccaaagtgcaactggtgctctacttgattacattgttgaaaaccatgttgctgctcctcttcttgctaatcatgctgcttctcaaagtaagtatcatgccttttcatgcttactgaagcatgcaattgtgtaattttagttgttatgacctgtaaaaggcgcataattttctgttcgaactgtccaggaatatccatatatgagctactgaacaagatactattttctatggcacatgagcaaaatatttcttttatttcttccctgactcaagacatccatgtcctcccagattttcatggaaataggtaagagttcatcacacatccagtgagtaagacagactatctaggtcacttttttgcagatttcctgtgcaacacacaagtaactcagacaaggccaatcacagtttctcttttactattctgaatctcaaccgtctgtagtgaaaaatgaaactttgattctggcatgtacagctattatttctttcaggtggtgaaaactgtggttatacatgttaacatttatacgtgtagttacaaaagttgctagaaagtgtttctcttttcttttcaccctgaatatacgtacaaagcaaataatatggcatcagtacagcttttgctaaaagttaatgctgcaccagcattgtggcatggatactttttatgagatgcacactatttgttcattctctccccttaattttgacatgcgaaatggagatgggatgaaagtgattgataaaattcaccatgctctctctctctctctctctctggctttacacactgaaaggcattctttcaatgcagtttacttgactgcactgtttataatggttaggtctcctttggctgatccaaaatccaaaggaatcatatgtggcttcacacttgatacaagtgagaagcacttggcgcttctttatctagcaacaattcaaggcattgcttatggtactcgtcatattgtggagcattgcaatgctcatgggcacaaggtatttatttgctatgaagagttccaaaatgaatttgatctgatggcatatatttaaaggcctagaatatgatatctttttcttcatgtgtcatagatcgatactcttcttgcttgtggcggacttgcgaagaattccttgtatatccaagagcacgcagatataactggcaagtttccttgtacagttgtactacagttatccatctcaattccctcatttcttgatctatgaatttggacatatacttgacaggatgtccaataatacttcctagagagaatgagtctgtgcttttaggagctgctgtcctgggtgctgttgctgcaaagaagtttccaggtgttcgcgacgcaatgaaggcactgaatgcggccgggaaggtattcccaagtcccaacacatcttggtctcaacctttgtactagtaactgggatcatcttttatttatagtattcttaaacaacctgcatacattctgctctttatttgaataatgctttctttgctggttttaccttttgtaggttgtatatccatcttcagatcctagggtaaagaaataccatgatgcaaaatatcagatattcagatccctgtatgagcaacaactctcccatcgctcagctatggcacaggcattgcagtaggggcttatgaccagttgaccacttccagtgaccactgagctgcccattcatttatcttgtgaaaacaccgtattatgttgccatgttctcttgggtcattgacatctcatatgccgaattccatgttacgtgatcaaactgatgatacaatgtataaacagtagaaggcaataagatccttcagaaatgtgatgttggttagaaaagcacaataatgaaaattataagttcaggggggaaaaaatccaatacatggaaatggcttgcatgttccctttgcatgcaacatgttttgtttatcatacagttgaaggtacaagttacaacacgtcagcaccagcatttacggcagaagggcgatgaatgactttagtcctgtttatcatcacctttttttcaggtcaccactcaccagttgcccggtaggcactcttgtttgctcctgaactccatgagtttgtgataattgaagattcattgattcatctactcatagaacataacttgattaatcacactccatatcagatgagcttgcagacagctgtccaccattgagcaagcttgataggcttctacagaactgcaagttgacatcatatgcattgcatttccgttcagtaaattgtgcatcgtactatcttgaggtggagccaaattgatctgaaacaaaaacataacactaacaaacctctttgtatgatctcagatccccagttgatttggacacctcgacgacgcagtgagctggtgttaccttgatcacctgcaatttctcacttttcaggtaagcttcaatccctgagcaacagaaaaaggacacactacacatgatggaagtgatttcagaaaggatatctcacctcggccgacagagtaagatcaagattgcttcttggtagtaatttgctgtcctgaatctccacctgtgacataatgagaattggactaaaaatttcacctggaatttgataatttcattggagaaactgaaaccatatgttggtgagatgaattaccagagagctgttcattctcttcactgccatgctcacatccttggctgcaaccttgatcttgtcgaaggtttcctgtactgggtgtggcgaggcgagctttgttttctgcaaaacatcggtcaatcaatcaaggatcttagtttactgccgtgtattggtgtaggtaatttgtgaaagtaatctattctaaagcttagtgcacctgctcctggaagagacctgacaagtcaagatcactgcatctcgctatcaattggaaggcattaatgaatcggtcagtttctgccgtcatctcttcagtttcctttacctagatacaagggcaatcttagcaactaccaacaggaaagactggttgagaggtaagaactactagaatggagtaagttccaaactgtatcaaattacctctgtgttgtgactgctatcactgtctgtgctggcctcttcaataacatcacaatcatcatcattctcaatccttgctgatggattgcagtgatcttggagccacttatcatcaaaaatatcgcttatctttgctctctaaagaacatttaaggtatggtgttatcagcaaaataaaggtcggcaaccatccaatgcttacatagtgctacataagtatttatcatagcttactgttataggagatggatccagtatcctgattataatcttcttctgagggacactgagccattgtggaaaaacaaactgagctcgagatatctttcaagagaaatattttcagttaggacatctgaaatcagtaacagacagtagagtaaaaggcggtatcgtattcggatgtttacccttctgtacaagtttgttaagctgcagtcttgaaatggtagataaccagcaagaagttcaaacaggatcacaccacaagaccagacgtctgcagctgccccatcataactcttgtgctgaatcacctgtcaaacaatctgaatcataagttggcaatgcaaatgactaaaacttctgcaagaaacttgtcctacctcaggagctacatagcatggtgagccacaagatgtggatagaaactgtcctggctggatcaaagaaatttaaacacagattttcagagttgaatatgaatcattcggtgatgctgataatgtttgctagcttttaccttttttagcacgctgaggccaaaatcagataccttgagattgccttgattatctaccaacaagttctcaggctgtttacatcatcagaaagtgctataaatcagcaaattatagcttatgatgaagggatcgagatgattaaaacagggatagcaattaatgaaatgagagcagcaatatcttgatttcttgaccttgagatctctgtggtagacacctctcctatggcagtagtctacagcatcaatcaattggtagaaatacttcttcgcttccttctcatccaacctcttgaggtaactcttaaacccagaagaaaagaaagatcaggaattgcaagaaaaattagctgagttaatcagactagaattacatgctggttaattgattatgcatgatgtcttactagcttgtcagatagctgccctcctgagacatactccattaccaggcatatcttcgtcttcgtcgcgatcacctgcacaggaagaaaaggtataatataatcctccattcctcctgaaaccctgatgctgatacggctgaaaccctgatgctgatacgggtaattagtaaccaagcttaatcacctcatatatcttgacaatgttggggtggttgaggagcttcatggccgtgatctctcttttgaccttcaccaaaatccagatcatgcaaactaattaacgatcgatcaagaacaaacttatggttgtatattttatggtagaagcaagggatgtaaatcatcatttccattacctaaaaaagaagaacctatctatctattcgtgcctggatcgatcgatcaatggactaaccacgaaacaacaaatgataaattacacagatgaattgttcatcatgatcatgatcatcacctggtacatgaggttgttgcggatcaccatcctcttgtcgatgaccttgacggcgacggtggcgccggtgtcggcgtcgacggcgagcctgaccttggcgaacgtgccggcgccgatggtccggccaaccctgtacctcccaatgctctccacaaaccccatctcgccgtctccctctctctcccaacttgtcaaatcacacaacacgagccccaagtcctactaccaccaccagcagcagacgttgccgtgtgcctgtctgctcatgaaatggccgtgattttgcagcacttttttttttgaggttttgcgatgcgtgagttgctgcattggtgaatggtgagaatgagagatgggagggaaaggagaaggacaaggagaaggagatgatgggtggttggggtgggtttggaggcggaaacgcccggggcgcgcgtgatcccgggatgtaactgccggtcgcatcgcactcgcactcgcatcgcatgcggcgatcgactctctggctgcttggtctcgtcgtctgccctcgcgtcgccggcggccggcgacgctgcgacggaaattttaacgggagtcccactcccacttccggctttgcgtaggtgggctgcaaacgagatcgggctaattttgggcctcgttttgcgtacgaaaagcgccgaaacgaaggccggcctctgttgcgatgttgggaggaggaagcgtctggaatggccagctagccggcgagagtggcttggcatccacggcacgccgggacggacgcacgctgccgaccaatccaactgacgggatgttttattatatattctttttattattacacgacatatatatttatatatatttatgtatatcaggatttaaactctagcatatgaaagtcgcgcattcataactacctccaataagagaaaatattctgatccctcgagaggatgttaagttccctcgttgtttacatgtcacttaaatggctatgaaaatttttttaagaagatgcattaatatgtgatgtatcactccacaaatatgtaaccacaaatatgtaagttcaaatttaacttctacatctcgcaacgaaaaaaacaatgtagaagttgattttgaacttgcatatttgtggaatgatacatcacatgttaatacattttcttcttttttttaattattttgataactatttgaataacatgtaaacaacgagaggatatccccttgaggtataaaatccactcccccttaaaaaaattgttatattcatcgtctcctgctctaattataaagatcggtcccttttcggaagctaaatcaatacatttgtggataatttattttttgcgatgactacatgtatagatataaatgaatggatttaactaatataaagttaaaataaagctggtagaaaagtattgagatgaaaattttttataattttacacgaaatatacatttcagagcttagaagacatacaaacaaaaataaaaataaaaaaaaatcgagcatctagcgtatgtttcgtgcgcttccttgcgccgaaaccaatcgtagccgtagactgtctccatctaacggacgtgaagtgaaggcaatcaattaagtcgaccggcctgatccagatatcatcgagagagtcccgcccataacttgttccacgcagctcaatgtgatacaaccccatatccagccgcggtcggcgatccacttgatggctcattactcccaaaagatagctcctcatcgctccgttgcagtcccatctccaccatcaagtagaagcagtgcatccgacccattttaaacgtagcaataagttctcgtgtttaattttaattatctatctcatttaataatattgttaaaaaattaaaaacataacttacgcataaagtattattcatttttattatgtaataacaataaaaatagtcgtcatataaattttaaataaaacggatgattaaagttagacacgaaaattcatggctgcgtttaaaatgggacggaagaagtagaacttaaataatagtactccctccggaataaaaatactcataattttgaataagactacaatcgaactttaaaaattgattacaaatatcatctaaaatatttgttatataaatactaaggccatgtgcatatattaaccttaaaaaatactttaaaaaaatcatgtatttgttaatattttaatatatattataataaaataaacagtaattaaaaattgcagatcatgttcctattcagaacgattaatattatcaaatatttttattaaatcccttatattatgggagagatgaagtatatttcgtaaagaagcacagctgccccttgaacagcgcaaatcacgtgacgcagatactcgtgcccgttcaacagctgggggaggtacgcccagttgggtcccgcaaccggatgggtcggtcggtcgcctcgcgacgccgatcgatcgatcgatggacgaaatgacggcatccggttcgtcatcaccccggccccacgcgcccccgtccacatcaactccgtccctccctcccaccgagccgggccgcggagagcgcgcgccgccgaatcgcgcgaaccaccggacgctgcccgcaggactgacgtcgctgctgcacctgcactaaaatatttaacgctctcgatttttttaaaaaatatttatccgtttgttttatttaaaaacttttttgaaagtcttattaaaaaattaagtaattattaattctttttctatcatttgatttattgttaaatatacttttgtgtatacatatagttttatatattttataaaaaattttgaataaaacgaacgatctaacatgtttaaaaaggtcaacggcgtctaacattttggaaagaagggagtactacagtagtatcaaaaaaatccaaataaagatggcttggtttctcctctcctttggtcgttttcaacggagatttttcactcacggaacgacagattctgaatagatcgtatagctgggttgcaattaacgtgcagcagggaccggatatatccacttgtgttgggctcgttcaacggctacggaccggcacgtcctacatatgcactcgacgtgttcctcccacaaaccacacacacacgcacacaaagctcaacttccttattagtattaacaagttctatggtacaaacacaaattaagtgtacgtgcaactctcattcaaaaccaaaagcaagctgagaagacgaaaaatgaacgttcctgcctaacttttaatttcgagaaattttactacggaaaagtgatttcatatatcctcgagagaaattctctcgtttcatacagatagtcataaaactaaaagcaagctgacacgatgaatatgaaggtgcctacccaacttgaattttcacaatttttactactacttgcgttaatcttttcccgcattcattttccgcgtagcacgagtactgagaaaagtctttggctatagacgttcgtcgacagtggcagtcacgcacaggttaattaacgctgaagatcagccgacgatttatatatcgatcgaggtggttagccggtcattactgtcgtcttaattaactttcgacggccaggtcaaaccgcccccttttaatttccttcctcccgtaaaagctaatctttgtctcttccaacctcattttgcaaaaatcgatttaaatgctccgacgttgattgatgcctcccccggtcgacttgccgctctcctaatatctccaccccggatcttctcatccactagtattttgtgacacataatttctcactaatcactactactccttccgtctagttttgatagtcatattttcaaatctgaaaaaatttatttttgatagacatattttaatccaacaacctatcattttaatgattttctcgaatttaatgcgtgactcactattcttacacacatgattggctacatggacattgagaaatgtaaatattaatgaatcgcttatttacgaggaatgactaatagcatgtttaaatggatgataagtagaattacttatccttggtctgtgtgtcaagatgaaatatgactatcaaaagtagatggagggagtactattcactaagcaagataaactcttttttcaaacattttttttattgtagaacagatcagaacttgatctgtttcgatgcaagtagtattccatccgtattttaatgtagattaaatgtatgacgccgttgactttttatcccattcgttttatttattttttgtgaaaatataaaaatatttatctcatgcttaaagaacatttgatgatgaatcaagtcacaataaaataaattataattacataaattttttgaataagacgagtggtcaaacgttgaaaaaaatgtcaacagcgtcatacattaaacggagttgctagaaatatggcgccatatgctacagtcgatttttttcagccacttacacagtagttacacctcatttacaccccacttacatatgtaattagtatgtaattttcgaatttacaaatgtaattttagtacttacatatgtaattttgagacttacattataaatatactaaaattacatatgtaatttagcgacttacaatgtaaatacatgccgactatttttcgatgaaaaatatggcgccataaatatagctacaccctacattaaaataatatggagatagtagctgcttgcgtcctctacagtgcagacacatgcaaaggctatattatcataagcgatgctgcttataaccagacctggatgcgattatccacacctttcggcctaatcatgtctactaatcagatcaggagatttttaaattagtcccaaatccgtggagcagtggcgtcttggttggcgccagtgggtgggccccaccgttcacatggcccagaagcgacaggtgggcccccaccaccctccccccacgaggccacgagacgaaaccgttttatttttctccacaattttcgcttggctcgcggccgtccacgtgtccccccaaaccccgccacgtcaccatcctacccccacctaccaatccatcctctccctcccaaacaaaccgcttaaataaaccccgggaaattcacccacccaataaaccattcgattcggaaaacttcccttcttctttagatgtcatttaaatagttacatttttttttaaaaaaaagtgtattaacatttaatataacagtccacaaacatatgagtttaaattcaacttctatatctcgcaacaaaaaaacaaattaaatcgcagctagctaacatatattgagctaaaattgtttttttcgttacgacttacgagatgtaaaagttacatttttatttatatgttagtggagtaatatattatatgttaatatattttcttaatttttggtgcaaggatatcgccttgaggaatcaaaatccacttgcattcgattcctcgcttataaagcgggagaccagtgcacgcctcgccgcgcccgcgagctcgtcgtcgttagctttgcttcgtggcgacatcgtcgagctcgcttgcttggttggtgatggagatggagctagggttgggaaggtactggggggttgggaggaggcggtgcggcgcgtgcgcggtggcgccggcggcggtgcactgccggacgtgcgacggcgacggcggcggaggtgggtatctgtgcgcggggtgcgacgcggagcatgggagggcggggcacgagagggtgtgggtgtgcgaggtgtgcgagctcgcgccggcggcggtcacctgcaaggccgacgcggcggcgctgtgcgccgcctgcgactccgacatccacgacgccaacccgctggcccgccgccacgagcgcgtccccgtgcatccgatcgggtcatccgccgccccgccgccggacgcgctcctgctcggcggggagaacgacgccgctgccgccgtcgacggcggcggcggcggcaaggaggtgaagctggacttcctgttcgccgacttcatggacccgtacctcggcggctcccccgagctcgcgcgcttccctcacgccgacagcgtggtgcccaaccacaacggatcggccggtcccgcgatggagctgggcttcgccggtggcggcggcgccgccgtcaaaccgtcgtacagctcctacacggcggcttccctcggcaacagcgtaagctcttgcccttctcttcctcgatcgcgtcaagaacaccttgcatactcgatcgatcgatcgcttacatctccaatttgtatttctttcgatcgagcagggctcgtcgtcggaggtcgggctggtgccggacgccatctgcggcggcggcggcggcggaatcatcgagctcgacttcgcgcagtccaaggcggcctacctgccatacgcctcgacccctagccatagcgtaagctctcgcaagcacgccatgaacacaagaaatcacctcaagttttatcaagatccaaccatctaactagtctgttttttctgtaaccagatgtcctcgtcgatggatatgggcgtggcggcgccggagatgagcgactgcgcggcggcggcggccgggagggcgtacgcggcggaggggagagcggcgcggctgatgcgataccgggagaagcgcaagaaccggcggttcgagaagacgatccggtacgcgtcgcgcaaggcctacgccgagacgcgcccccgcgtcaagggccgcttcgccaagcgcgccgacgaccacgacgccgccgcgccgccgccgcagatcatgctcgacttcgccggctacggcgtcgtgcctaccttctagtgttctagctcatcgatctgaacgttttttgagctggcaaattgatcaagctggcgttgcatacgtacaacgtagtacttcaattcaccatgcataggattagccaaagttctagttgatcacaattcacaaacttgaaagttttttttacctagcctgattgagttttaggctagtttctgcaatcgtgtttgctagaacggctataactagttgtagttaatctggattttctgtatgtatggtgttttgtagtaccgatctgatgatgatgatgaagaaaaatatttgggcaaaatcgatcgatctcatccagtttctaattaacatgcatgcgatcgatcgattgcgcgcgagatctggattgagattaattactcgattgtttgtgtgataaattattgatgggacggccggcgacttactactagtatgaagatcgtgacatgcttgacttgaataatagtggcaaaatctgcaaaatagttcatgttcaaaaaataataatctgcaaaaaaaaaaatacaagagacctcggtttgaattattacaagcacgtgtgttggtctcttgtaaaattattattttgcatattattattattattatttcaaattacgttgcaatgtaatttgaaaaaaaaatagggttcaaattctgtagtcttgaaaaaaaaagtttgaaaggccctgcactttaaatggagccccaagtctaaaataaagaaaatgggccgttgcgctcattcggcccagaaatgcctgtgagttggctctcagcttttgccaactcagaacgaacctaattgataataaaacctcctaatccctaaaattagtaacttttacaagccataaaagaataattaaccgtaaatacgaccatcgtgttaaatttagaatttgaacccggtagactgattccaccataaaaaaacctaacaagttgagctacgctcactttgctttaggagtggattttggaattgagctgtggactggcccattttggttcattttttaaagctcattttagcccatttcattttttttgagcgaagctaaaaacattttaattgaattctagttttaaaataggtggatgtgagctctgtcaaacaaacccttggttttttagatgctataagtctttcgtactttttatcttacggattacggatgatcacaataacgtttcttgagctcccacgtgatgcctttgaagaactagcatggtggcccgcgcagattgcgtggctagtatcattatattttctctcatataatagcatatatgttttgtcattatattattaaaatttattacaatgacaatataattttaaattttgcaataactttacgaaactactaatgtgtaatattcatattgtattttatatacgtgttagttattaattatttttaatatcaaattctagttatttgtaaattatatatattcctatatggactctagacttgtcttttaatatattttttttaattctgaatttttattatttctaattgtatttctacgtggactctaaactcatctttcaatattctttaatttttaatttcaaatttcagttacttctaaattgtattcatatcttaactttaaactcttcttcccatgtttttcttaattttgaattttagttatttgtaaattatatttttatacggactctaaacaccacttttcattttattatgtttattctgaattttagttagttttaaattcctatatggactctatactctacttctaatatgccttattttttaattccgaatttctattttttttcttaattgtatttctatatggactctattctctacttctaatattccttatttttaatttcgaattttcattatttcctaattatatttctatatgaactctatactctacttctaatattccttatttttaattccgaatttcagttatttcctaattgtatttctatatggtctctagtctgctcttctaatattctttattttttaattctgaatttcagctatttctaaattatattttcatatggactctgttttttctttttctccgattaatgtgagaattttaggtcatgagagcgaacgtggaggctcctttttattccgaattttagttagttttaaattcttgtatggaccctatactctacttctaatattacttattttttaattccgaatttctatttttttcttaattgtatttctatatttctaatattccttatttttaactccaaatttctattatttttctaattgtttttctatatggactctatactctactctaatattacttatttttaattccaaatttcagttatttcctaattgtatttttatatggactctagtctcctcttctaatatttcttattttttaattcaaaatttctcctatttctaaattgtatttctatatggactctagtctcctcttctaatatttcttattttttaatttcgaatttcaacaatttctaaattgtatttctatatggaatctagtatcctcttctaatattccttgttttttaattccgaatttcagctatttctaaattgtatttctatatggactctgccttttctttttctccgattaatgtgagaatttctaggtcataagagcgaacatggaggctctttttattccgaattttagttagttttaaattcctatatggactctacactctacttgtaatattccgtatttttaattccgaatttctattatttcctaaatgtatttctatatggactctatactctacttctaatattccttatttttaatttcgaatttcagttatttcctaattgtatttttatatggactctagtctcctattcaagtattcaatattttttaattccaaatttcaactatttctaaattgtatttctatatggactctagtctcctcttctaatattctttattttttaattccgaatttcagctatttctaaattgtatttctatatggactctgttttttttttctttttatccaattaatgtgacaatttctagaccatgagagcgaatgtggatgcttccttttctattcctttaataatataatagattacttgttcttacatattggcatcatcaatgattcattacattttgatcattattttagaactgaccaaagttttgtaagttactgcagtagtgaaattaacaaattaattaattgtatgggggcaaataatatacacatattcactgtttctatgcggtcataactcataagtaatatgattaagtacactttcacaaatattcattttagtttctcaacaaatgatattctactatttgagtaaaaagttgcattccccagagaaagtttcctgtaacttcatgaaaactttttgatgacttaagggtgtgtttagttcacgctaaatttagaagtttggttgaaattagaacgatgtgacggaaaagttagaagtttgtgtgtaggaaagttttaatttgataaaaaaaagtttaaagtttgaagaaaaagtttataactaaacttggcataagtacctgaattgtttttgagagttggagatgtgtggaaagccaacagctaggagccccatcgtttggttttttctaaaataaaactgaatttatcggtaaaacttttatatatgtgtttttttacttaaaagccaatgttaaaaacaaattacattaaaaatattttaaaattaaatttaaaatttttaaattttagctttttctttggctggctgggccatccgatgggagccttaatattttttttttttttaaaaaacctgagcggctgagcctgaccttgcctccgcctccggcgtactgtagtccggtccggcctcagacaaaacccccctcctccacggccgtcgccaccgtcgccatgtccttgccacgcctcgccgccttctactggccgcgcctccgcgccgccgaccgggacgacgtcagagccgccgggatgggccacggcctggacccggaggggatcacgatcaccccgctcatggacatggtgctcggcttcctctaccagtccatccccaggccgcccgtctccgcctccgcctccctctccgccgccgccgccaccggcgacggcggtggcgacgaccgcatcagcctcctccccgacgacatcctccgcgccgtcgtctcccgcctccccgccaaggacggcgcgcgcaccgccgtgctctcctcccgctggcgccgcctctggcgctccaccccgctcgtcctcgtcgacacccacctcctcccgcggcgggggggaggccgccccgcgcgcgcgggcgccgcctcgcgcgccgtcgccgacgccgtctcccgcgtcctggaggcgcacccggggcccttccccttcgtcagcctctcctgcagcttcatcggcgacgacgcgcagcgcggcgtggcggcgcggtggctcgacctcctcgccgccaagggcgtcgagcacctcgtcttcgtcaaccgcccctgcccgctccccggcgtgaccctccccgccgcgctcttcaactgctcctcactccgccgcctctacatcggctcatgggagctccccgacaccgcctccatccctctccctcgcgccgccgccgccgccgccttccccaacctgcgggagctcgtcctcgggtgcgtggtcatggttgacggcgacctcccctttctgctcgccgcgagccctgctctggagaccctcgccgtgttcgggatcctcaacacgctgcgggcgcgcctctccagcggcagcctacggtgcgcgcagttctgcttgtcgttcatggaggaagtggccgtgctggatgctccgcacctcgagcggctattcctctggagaaacatcaagaacaccagggtcaagattggccatgctcctcagcttcgtatgcttggttacctgcagccaggagtgcaccaactggagatcggtaacaccatcatcaaggtgaagatcaagcctgattgaaagtagatagaccatgtttattttgggcaatggatgagttaaatgcctgatgaaatgtgtaatcaatctgttcctgggtgcatattgcaggcaagaacaattgtgaggccaggcaccactgtcccgagcgtcaatatgctggccttgcacctgcatttcggagttcggaatgaagtgaaaatgctgcccagcttcctcagatgctttcccaacgttgagacgctgtgtatcgaggtggagtcaaatcctcctttccctgcacttgttgtttcttccatcatcattactgcattgcatcagatcgttgcctctgtgcttcatagtgcattactagtatatggtatttatcagtgtcttttacaaagcagtaaaaattgataattacttatctgactaagtggaagagtggcataagatcacaattagctactatatgtaatgtgaacacctcgtgaatgattaattggcccaataatctgttgtactagtggtaggccccatccattgctccaaggtgcatgtaaaagatgttgattgtgcaaattgtttgcagtcatctatcaaaatttaagtatagcaaccatgaggatcactgcatgttccatcgactaaattgatttttaatatgtttcttacaacatcatgtactagcttccagtgacaattgatacatgagcaattatgaaaaatgcactacttatttttatatgttaacaatggaaaccagctcaccaattgggccaactttgtcaacacatattgccccaaaactttctcttatgcttcatcaatactagagaaatgtctcggcatttattttggagagctactattaggctcaaagcagtaaagcacatctatggtccttaatattactatctatgttgatattttacagggcttatctcattttaaaaagtatttaaggttaaagtttgaccattaattgcttgtaacttaacagttataaaaccaacattttgtgaaaacactttgaaaatgaatctattgtgctaatttctatacactaaatgtacttctaaatttgcttctagtttgactaattgttggttaaaatatatgtacaattagaccttttgaaatcaaaatacacctcataaaaatcgagggagtatgcagttgtctattctcgcatgataattatgcacaaacttaaatctaacacagaaaatagagcaccacgtattcggagcctttggaagaaatagttacatacttggcatcatcaatgattcattacatttggaacatcgttctagaacagaccaaagtttcgcaacttcttgcagtggtgaaatcaacaaattaattaattttacggggcaaataatatacctatgcactgttgacattgatcagtggttatatgcttgagtaggctttcgcaaatattcactctagtttgtcgacaaaacgttatttgactatatgagtaaaaaagtttcattgaccatacaaattttccagtatctttaggcctctgatcacatcagttttatgaccttacgtcaatgcagctatttcttgccatattctataaaccaattgcaagctttaaattttgtgaaaaaatgaatgtttagcttggttgaaagcttcaatttattgttgtgtcatttgaaggaaattactgtatgtattgtctattcggattagctttttaagcaatgattatgccaaaattatgagttaagtatatcgaggagtgtcatcatcaaggacataaacatattagccttgcattctttaatcactcggcggtaccttacctgcttgacgaccatatacctcttttactactctgctagatataggcatatagctgattttgcattggtattgattttcagtctgaagaagcacctggacgcactagcaacattgatgtcaacttctggcaggaggccggccccattgaatgtgtccagtcacaccttaagatgatgatcttacgggagttccaaggggaggaaagcgagctttccttcctcaagttcgtcggcgagaatgctcgagtgctggagaagatggtgattgtgatgaaacttggaaggtactctgcaccggaagaggtggcagccaaagtgatggatctgcaatctgctaaatgggcaagggaaggcaacaaactggggttcttgatcagtagacttcgtgcagggggtagcgcttggagcctccgagatggaactgatctgtcatgtgatgatccttttatgtgcctctgaattcagagctcaaatgaggctggctacgtacatatttcgacacccaagatttcacctgcagtaggctagtagctgtggtgactactcctagatgcaaggcactgatttagattgttgtgctgtcttttgggttggacaggattcaaccaattacatttgtggtgactactcctaattgctggatttctatccactattcccccaaacaaaagaatatcatgccacatgtttctatctgaatctgaatgacagaatggtactctctgagttccatgcttcgtacaccctttgtgaaaagacacgtagcctagtggatgtagtgacctgaatagcaccccagggtcctaagtttaaatctccgtaggatcgaatttcagattggattatttgagagctaagtttcctatttgataggctaagttcctaatttaaaatggctgcatatattgctgagtaaaaaaataccattctcttaaaaaaaaaaagctgtggctccggacgaagtgagtcaggtaggtgaaatccaccgttgcgggcctaccaaagctgggcccacgaacgtagtcgttgagcgcgaaaaggtcagcccaggaggcccatcgagatatggaccccagttaggcccagaaagttcatggcctggtttaagtcgatctatggccgttgaatcaaaaaaacgaacggtcactattctgcggctatatagccgcttgcatggcgcgctccggttgcctctcgccgcgccggcgccggcgagggtcgccgccggtggccgtgagaaagttccggcgactcgattgaccgccgccgacgccgggaacaacttccctcgcaaacggacggtgccgacttcgccggcggcgagtttggcgatcgagcgagcaacaagacgatcgaccgacgatgaaattttcaggtgagcatgaatggatgaaaggagccaaattaatttgcttgagggtgatcatgttgatcgtcatattaattagtaattttttactcctccgttcaaaaatataagtacttttagactttgatatggttttcgagatgctattttaaccaacgatatctgtaaaagcaagatgttccaaataaaaggagttaaatattatgatagtttgttcaatgataaatctagtaacatcaattttattttatatgattgattttttttatttttttttgctattaatactcaaagttacaaatatttgacatggcactatgctaaaaatacttatattttagtacggatggaatatttatcattcaacacagtttggagaataatatcttatacaagttgacagggcacgggagcatctaatccgagctgtcggcttgctcacgaattctcaacgattcagattcaggtgctccttccagtccactgagagcatgggcaacagtgatcaattgacttaagttttttttttctgtagaattcgtgtcagattatgttctgcattttaacgtgtaatgtcaatgattatatgtaatctgacaaaatatgtaggaggggtctatgcagacaagaaatattatagagctgacagctcacggccgagaacctgtccgaggtcagggtcaggctcactttccatgcaaaatggccttcaacaagtctgcacggccatgatgatgctccttgccggctctggcccttaatttggattattattgtgcttttgcatgcccttttagtccatccatccacctgtaatctctgttcaagcttttgcctacttgtctggtatcctccgttttataatataattcatcctaacatttcccatattcatattaatgtttaaggatttagacatatatatctatctagattcattaacatcaatatgaatgtggggaatgctagaatgacttacattgtgaaacggagggagtataaattataaacagttgtttagtcagctacatcctcaagtccaaacaactaatagtgtttcgcagcgatcgaccataacgaaggtgatagagaagagatcaggggcgtccgacctgctcgggagctagtttttttttgtttacttgtatattttcacagtagaattaattttaactattggtttatgaattttattactatcaatagtccaatggtttgaaaaaggataagtgctctaaattgatattactcgaataacgatcaccgtaaaaattgaatttatagatcaataacaattaatcctttagtagtaaccaagttgtattaattagttcactcatctaagtgtatttacagtcccttttacacgagcagtgtaaaaaaaaactaaaaatgttacaagatggaattaagaaatattcaagcatatatctacttaattgtgatcttaatttaattttgtgttgagttagctcgtaattacagagctgtgactactgctggtttgctcacttgggctctgcgcctgcggctcaccgtcgccggctagaaactccggcgccgccgccgccgccggcgtcttcacctccgtcgacgacgacgacgacgagccggaggcggcgccgcagctgcagcacacggccgccgccacgtcgggcgccgccggctcggcgcggctcgacgccggggtggcgaggaacgtcggccgctcgtcgccggccatgatcaccaccacgtggtcccgccactcccgcgccagcccgccgccgccgccgcccgagcccttctccccaccaccaccaccaccaccatcccggctctcctcgccgccgtcttgcccgccgccgccgccgccgccggcggcggcgagcttccagtacgagcacgccagcgcgagcagcgacagcgctatgagccccagcatcgccgccagcccgccgaacaggtacggcaccggcgactgccacggcgaccgcgccgccaccgacgccgtcgacgccaccaccgcgctcgagctcggccccgccgccgccaccgccgccggcgcagggccgccgccgtgaaccatggcgtactcggctcccggcctcattgcagtattcagcttaacttttctctgttgttttcagagaagtgaggcaatgttgtgtactctcctggcttagtctcctatttatagaggcccatgcattaatagctcactaatcaagtcactaacatgacaagaaaatgacaactccatgagaaaacaagattaattaattaaggtgtaaaatatgatgcaaaattataatttgtttggggactgatatattggcataagtaatttcttcataggtcaatttgttaggcacaatgcatgatgatgtcaagaaaaaataattatcctacatgggtagctaggatttgggacaaattcaagtggtatgtcatgatatgacaacccttataaatactactatatcaaaagcttgattaccaaaataaacctatcatactaaattagtagttaattccttccctagattagaagggcctgaaaaaaaaatctgcatctgatttgccactggtcttacggcaaggatattccaaaagcacttctctttgcttgataagcttgctaacctgatattctcagtgcaagcatggttgttaagtataacagatgcaaaagcaactctctttttagctttagttggcactgcatggtactatggtttgcttacatatctaacactaactaaaaactcgcttttgcacattttgggattggatctcacgttgcaagaatcatgctaatctgttgatctgatcaggcaaatcaggagcagaggagtagcaatgaagggatatgtctctccatgttctgttataactgaaagcctttttttttcttttctttttgcagcattggtagctagatcttgcatcacttgaagagttctgatggtatggttgtgagttgtgatgagtctttgagtcatcctgaaaccaacttttattattattattgagttagttcttatcaagtttggcctaaaaggcaatggtgcaatctacagttgcaggatattacaagctattagcaactagtagcaaaaccatgttcttatctgtaacctctttatgtttatgttcaattaatctgaagtggagtgagcattacatggattgcatatgttggaggaggttctagtgtgccaattttttttaaaaaggaaaggctccataaaatggaccttggagctgtttcctatgaaattcatgcgttttttatgacttctaaattttctcctcggcactttttcattttcaatcacataatataacctttcaccttttcaccgaaaaagaaagatgccaccttctgcgtattcactatcgatgttgcttgttgctcttaaaagcactaatttggtgtgatatttataattttaccttgagaacactataaatttagaagaaaaaaaatgcaaacggtacacttggctgcaataattgagattttggcgagattcgttttctacatcaacagagtttcggttttctgcgtaaatcttttcagcatgcacttcaaaacatgaaaactacacaaaagggttttggttgaaattatacacgcaccaaagctgcaaaagttgtagaatcaaatgtgacagataaggctttagtgtctctaaaagtagaggataatgtcataatgctccagtgtgttgcttcatctctcctacttccatatactccaatcctttttttcaaaaggcagtgagctatcatttttgagagaaaggcagtagcaatcgttttttatataaaaaaaagtttaagagcttttagatgcaccgtgagattttagccacctatagaaaaatcaaaggcgattattttgcaagtcgaaatgtgattgggaacagttgacgatgacaaattgaacagtgcaccaacgatacaagaaggttgctctcactctttaatctctactttttcatgcacgttgtttgcaagatacatgaatatacagatgcaccctaccttgtggtaaaaaaccaacctttactaacagaaaaaaaaagcaggatggaagatttttattcgattaaacacatcacaccttaaaatcttgacaaaatttatgtacaacttgaaaacaacatcggcgcttcatttatatgaccttgataaaatcttgtcgcaaaaatatgccaccactaatattgtcaattttacgatatatgaaaggttctaaactctgaattttgatatggcattttcattaaaaaaacatggtaactgaatttttttttactggttagtgagctgcttcatccaataaataaaaactttattcaatagctatagcttgattcttggacacggttgaactaattggagtatctgattggagtccactgccaggtgatccatttggttgggcgatcaccatcaagccggcccattgattatgtcctttaccggatggatttattagaacactgcaaaaagtgaaaaaaatgaagactctctatgcttaattgagttcactggaattaatcatgttattcccttttgatttttgcgtggtttgggctcacatgcatgctgcatgcaacttcttgtctgggtggttgcgtggttttgtcgtgtgcacggatgaactacttttggttttctgagttgtccaaatagacgtgttcttttataattaaaatatataatttaccttagtttccgttagcacttattttaaactattaaacagtgtatttcgtaataaaacattataaatagaagtttatttaaaatattaaataaattcatttttcagatttaaaataattaaaactaaatcaattatgtgctaacagatttctcgttttatgttttagcgcttaatttttatccgccaaataaggctttagtctgattggattaccgttaaaatcaagtttgactttgaaaggaaatccatttgaggtatttgacttttaagtttaaatatatctggagaaaaaaatgacaactaaaatattacgatccgcatatataactcataaagtataaagccaattattcataaagtacaaagccggttattctgctttattgattctatcctgagatgtgagtgtagctatttatccatctgtttataggcagaaaacaaaaggaagggtagaatattaactcttaattgtgtttgataaagtttatctgcaacagattacacctatagtggactaggagaagaatcaatggtatgagtggccactggccaggtttagctggccgatacttatattgatatataatccttttgcgtgttcgcgaaaaaaagtcggatactggagctggggacaaagagctagggcatagcatctatgagaggccatgacccacctccatgagtttgccggccacccgccgccgccgccgatcgccgggataagctcagacccaaccggaagatgccacacacagagagaatagacaaatgggcaaaaaagaaaaggtgccagctttgccggaaaaattaaaaagaaagaaacaaagaaaggaaggaaatttcgcttgcgaattcgcgacgcaactgatgacgagctgggtcagtgcaagtcgccatcggatgatcaaatcgccgggttgccccccagccatgcctgatctctgaattttgctttcagcttctccgcccacaggaatcgaatcaaatcggagatgttcttgcctgcaggctggcaatggccgcaattgctgcattgcattctgcatatattcagtaggagaatgggcactgcagcccaggtgctcgggacactgttgctgtagatcggattggacattatcaggacaggaacatgacgtgttcattgtctgatgatgctactgttcttcagattttcagacccttcccctgagcagccgcgaatctaggatgaaaattaaggtggggcttgtagtaaattattattaacttctattgctaatcaaaattagatttataatttttttataaaaagagacaacatgttgtgcagtaaaaatatatatgctacaacggtttgtaggttactttttccttaacttcttctaagtaaaatatgtgcagagttttattctgcatatactcctaccgaaacactgaaaaatctatatgtacttctaaactaaatatctagtctagtttaagggaagaaaaaaaatactatcgatcaccaatcttgggaagcataattggttagtccacagcccgatatgggccagcatggcgttacgatcgtcttcctcctctagcagcaatcgtgcatccatgtattatctctccttgctgctctttgatgattctccaagctaactaacaccacagagagaagggagacatgggagttcaggttattggaggtttgggcaagtcctaagggtagattcgcccctgcccctgaggacgtcaagtcagtgggttcaggatctgaatatgatgctggtgccctttttctttatttcttttcttccttagttaactcgataatttgaacaacaaaatttgaaatttacctgaaaaaattcaaacaccaaaccatgggtggaagctggaaatacagggaagcatccggagattcagatggttttgcgctttgaggcggaatcggattgtgcgatgatcaacttggcctcttttcatgcctctgaacctacgagttcactgaatgcagccgattccggcaggtgcagatgctactactgatctggaacagtgatctccaaacgaaaagacgcttcttttttcttttcatccatatgggcaggtcaggctgtccatttcttacattcttggtgtcacttcaattcactgctgttaattacaccagcacttatgaacagtgcattgctaaattcccaattctgaatttcttcctcactttatttacaaaaccagctctgaatttctgcagcaagagcaaaagaatatgaatcacctactatcgataatgtggtagggatgaaaacggtcggaaatgataaaaaaatatcattttcttttgttatttctactatttttatagaaatggtcgaaaataggcatgaatgtttcgtatttatgaattaaactatttagtgtcaacttcaatacatcactgacataaattccaaagaaaataaaattttgaaacggtaacgatagataaagacattattattatattagttttgtgaaacggtagggaaatttccgtaatgttttcaccccggtgttgttgcctgcagctgcagtacaactacaaactgggccgcttgtcagcaaacctgagaggaaacgattgagatgggcttaaaactaggcccacatgacgacgtctccctcccaactgggcccactatgtaggcccatgggccggaccatcaagttggcccacgaggcccataaaggagaagccggaatcgcccataagtaagagtagtagtcaagagtttcggatacgcacgccacgcgcaaacccgatctctccaaccttgcgaaggcgaagcccccgtgagatctccggccgccgccgccgccgccatggacgccgtcgactcggtggtcgacccgctgcgcgagttcgccaaggacagcgtccgcctcgtcaagcgctgccacaagcccgaccgcaagggtgagcgccagatcccgatcccgaccccgatcccgctcgaggcctcccgatggcgccgcgccagatctgatgtttgtttggcgtttgcttgcttgcttgcttgcagagttcaccaaggtggcggcgaggacggcgatcgggttcgtcgtcatgggcttcgtcggcttcttcgtcaagctcatcttcatccccatcaacaacatcatcgtcggatccggctgatttgagcactaaggtatatatatatattctctcgtcatgatctgcctcgatctggttgcttcgtgtcgatcgatctccgtgtgaatccggttgtgtttgtggatgcgatgtgttgtgcaattcggtaggggtttagtatcagttcgcttatatgtaattctgcacaatccttgagtatttgtttggaatttggatattccacgcagcatcatgttttggttgatacagtaatcaacaccaattgctatgagatcaccttaatccacaccgaattgacttaaatgcatttatttgggtacttttagcctgggttgaggtcaattgtagttaagtggataccatgatgccattttatcttttgaccttactcattttgctgaatcctagtctcttggagaacattttcttctgaattttgctgcagtagtgtatatgtacgctctccttttgatgcctgtagcgatgaccgatgcaagtttatactgtcccttgttagacaactcggaacaatgagtttcttctgtcctacatctcctattctctcctgcatttcaagagcaagtgttgcatgcaggtgccattgtgtttatggatgtaattttcacgtgttatcggtctgcaagtgccaaacttccagacttataaactccaagaaatgttccagcctgcttaggcaactttatcatgttctatatctacttatagaacttaactcaaggcccatatcaattggtagtttagtaatttcagctatatgtttttacgggactgttgtacctttgtgtcttagcaagacagtgtgctaccatgatttagctttattttgcctagtttctatgcatgtgcaagtgtaaccacacatatataacacaagcatatcttgttagcatatgcagatgtactaattcatactttatcagcttggtttgaaaagactgttgagagatgcttaggcgtgtgtttttctctttactatgtcaggttcgatcaagaaaaaaaaagtaatagctgatttggcaaatatttatgtttgtttagtttagctcagaagtttcagtggtataatgactaaaataaacattaccatttctgttttaacagcttgaaaaccattcttataagattttggaacaataaatataaaccttgaatcctagttttgaacccagaagccttggatccttcttcttagtcttgcatgaagtgttagctagctgtaacaagctaaaacaaataccacctctggtggcctagcggtagcaaaccggatatattagttttgcatgatcaagtgttaatgtgtatgtaatccacttcaccttgtctcatcatgaccctcttgcaaccactgacctactccagcttccgttttgctgtcatgctttttgtgtgttgtgttttgcttcggatgactatattctgtttgtgatcagttctaaaggattttgttgcttatcgtgcaggcaagaattcgcaggagttgagggtggcgtcaaacatcgcagagacggctccacttctccgttcctgatgatttcgtaaagcaatctctgtaggaccttgttgttgagtacaattccccatttctttcatttgaaagaaacaaaatacattttgctgcctggaacgttttgtacctgataccgagtaaactttatgaagtagtagagagtaacaaagtttacaaatatcccttctcggttgcattgtcgtctgtgtaatggtgtgtcgtgcccatctcactgcaaaggtcacaaggttaactcctttactagctgcatgcagtactgttcacagacctgtggttagacgcaattacaagtgcgtcctgattatcacaagtaattgcacgcatgtgcagagattaggtaccaaccatgatctttcagagaagacatagaaaggagaacgaaaatgtaacaagcgtctcatgatctttcgtcaatactacaatatatggagtacatagaaacctgggcacaactcatgacgatgatgattatcatcgtacttgaaaaacaaaagcacaacccatagacgatgatgctgaattgatgatgatcatcatcgtacttatataatgtaaaaaaacaaaggtaaaaaagaaaagaaaagaagagaggttaaaggcaaaccaaagggcacacggttcatctgtagtgagtgttacaagacaacatatgggacggacgacaaaccgccaaatgtcgtagcagaaaggcgagatgctagtgcttgctggagatgctgaaggaggtgaccttcatgggggtggccaccaccagcggcgcctccggggtgtcgctgacggcgtacttctcgtgcatgaagcggctggcgacgatggactcgtccttggggatcaccttgtagcagtagcagctcttgagcccctcctggcactggtagcactcgtggtggctgttcttcacctggaggaagttccacaccacgctgtacttccccaccgtcgccaccagatgcctctcctgcttcccgttctcggtcacctacaccgcccacacagcacattcacaaacatgaatttttgggtttgcaggatgcaacaaaaccaacgatgtaaacgcatcagcatttgtattctagtttcataatgactaataatacttccaaattcccaagagagctggttttcaacgtatcatggttgatcaaacatacaacactccggcatttcttagctacgcatacaccacaaaatatggggaaaacatgcaagtggaaaccattactaaggtggaaacttggaaattatgcacaaaacttatcagagaagtctaagacaaaactcacatataggtaatgttatactatttaggtaaccatataaaagttcaagatcaagctcgtgtacattcacaaggtatgagactaacaaacagcgaagagaaagaaactattcctgattgtctttttgtccattatttatcaattatctatcaaacgtagtcaaatttcaccctcagattttgtatggtgtcaaatattatcttagctacatattcgattgttttgtgatgttttgagaacattcgtgctttgttctacatagtttccaccatatatttactctacagcacaaaatgtgtgctactgctgagcatcaaaataagatgtgaaaccccagtgtaaagctttaggcttttagcaactacccctcgttgtcaaacttatgcaagtaaaaggttgacacgaacagcttaaagtgagtcactagtttttaacagcatgcgtacattgcgaaaacaaaacattttagcactttttcatggtatacttcaagaagctaaaatataagttgggatttggtcataagagaaataataacatatgtgttgccaatcaaatccaattcatcgatcactattttggtcaaattgccaatgtcatacacaatacccgaatcacagtaggcatgatcaattttaatgagcgaaagctacaaacctacaatacggttttgcacaagcaaatggctgaacaacttcaaatgattactatgtacacattatgtgggattgtggatatacaccttcataaattcatggtttcagaatgcgcgagataacaaaagacagttttaaccatgtgaattgatcttggttaatgcacaaaaaagtaaattgaaatgaagtggaaggctatactcacccatgagaacctcccttcacggaatatattattctgtccagcaagatgtgaatcaagcggggtcagcttgagcaaccttggggcagcaattctgttgcccatcctccctccaaaccctgtcttttccttcccatccttgtcaatgaagatggtgcatataagaatcaagtacgtgtcagtagttccgaggatccactttccatcgtaggtgacgtcgacatgagtaattggtgaacccagccctgggaaggctgtctttgccattctcatagaactcttcgagtacagacggactttcccatcaagtgaaccaacaacaattgacccatctcctgttgacgcgaaacactggaagttggtgcccctagagaactgatgcccctgtgtccattgcaggaccggcgactctgtagcactggctatgttctgcacaatcccccgacggtccctcatgtcccaacggcataacctgttgtcatcaagccccaagaaggtagactctgatgggtccatttgcgcacccttggaatcatttgtgatatccctcatgttaatatctgctccgtccttcccaaatttccattctgagacgacctttccggtctcaatgtccagctgatggacacccttggcatgaggcttcccatcagttgccgggctcatcaggagcatgtttgtctccgcacgcataagaagcgccttcttgggtgtcgagaagtttgtgctccctccggagaacttgaccgacacgccctttccgtgtatcccatgctcgaaattcctcaccacctggattcccgaatcaccaaccaagaaactgttgtccaatgcaccaagcgcaaggctctgtatccctccaccttcctccactggctcctcatactccctcaagtcctccatgagcggcttcagaatggggctacgcgacggcatcgggctgcgactcgggctcggcacaaacccgtctgtcgcgtcctcccagatggactcgtccccgtcctccgggcgcgcccacgccgcaaaatccttcccgaacaccttggcgcggccctcatcggtggcggcgacgccgtagctgttctcgaacaggcagctctggtacttggcgtagaaattcgggtagccatcggcgtggagaaacttgagcgcccagacgccgtcggcgacgaagtcgacccggcgctgcgcggggaacgtcttgagctgcagctcgggcccgaccctggcccggatcttggaccccacgacgaggcaccatgggccggaggagggggcgtcgtcgtcgtcgtcgtccccggcgcggacgaaggaggcggcggcgaggcggtcggagatgatccagcgcgcggagggggaggagccgccgatgtggaggtagagcttgacggcgttgagggcggcgggggcggcggcggaggtgggggaggggctagggttgggggagatgggctcggcgtacttgaggtggaggctgcggaggtggcggtcgatcgcgtcgatggaggccggggtggccgccgcggccgaggacttggcggcgctgggcttggcggaggaggaggggggtggggtggcgaagtcggaggaggcgtcggaggcgtgggaggcggagtcgtcgtcctcggagtcggagaggtcgaggtcctcccggctgtgcgagcctcccatggcggcggcggcggcgattagggtttcggcgaggagggggagggggagggggaaggggagggaatttgaaatttgggagcggaaggaaatggaggaggtgttgagatctgggggaataataaacgttggatcgaggctctgaattgaacacacccgaacggcacacacgctccctcttcaaattgaccagtacgtagttccgtactagtacctccaaatacccatattttatcaaattttaatacaagtaatatttcttattttcataatttccgatgcaatgattactcaaaaactaaatttattttgggataaaaggaagaagctaaaaatgaacttattattatgggatagagaaattactaaggccccgttcgaatccacttaaaagagtggattaaattttgaattaaagtggcacactttttaaattactaaacggtgcgtatcgtgcgaaaactttctatatgaaagttattctaaaataccagattaatccattttttaagtttgtaataattaaaacacaattaatcacgtgttattatcacctcgtcttgcatgaaacacttaatatttatcttcatctttatcttaaggagatttaatcaccacctaagtactggtatatatactttaggcccgttcttgaatttattttctataagtaattaagatgtagatttcacctcgatttttgttatgggtttttaaactgttaaacggtcatttctcgtaaaaaaactatatagaagttaatttaaaatatcaaataaacccatctttttttcaaatttataataattgaaacttaattaattatgtgttaatgtttttcttgttctgcatgtaataactttatcttcatcttaatctatctaaaacaccaccttagtacatggcacgcaagttggtgctggttttacatcgattttgatactcactctactttgattgctgaatttgaatatgaactgatttgttgccatttgatactgtagtaccttatagtactctattttgagctctctctgttttttcatgaatagcctaataggttttttttagataatgcatagcctaataggtgaacagttgaatgattttgtgataactgttcgaaggtttgaccgaatgaatgaactaggcatgccaattaactgttataaaactgaatattggtttaaaaagtaatttaaagaaatttatatggagaaagttttttgcgaaaactacttcgtttatgagcccgggaagcattccactaaatagaatcagaatgattccattcctttgaaaagaaaacacagataatatctcagcggactacgataattcagtcgtttttagccaattctgatgaaagttaggtgtctcatgtctgactatctctggtaaagcgtgatgcacatatgtcatatgcaagacaagagttcgggaaaagaagggttttatctaacttctgtacgatttaccataatgtacactaacaatcttcatttctaggaccttaatagaaatcacaccgctgcacaaacgaaaagtcattttcagccatttggtcatttagatctaaatttccaagcaggagcacgcagtttcttatgaaatcgctactaatctcgcaaaataacggagaaattcctgtgtccaaaaacaaagcacaatatgcaatattgcaaacgctctgcaatgtcatctccgacttgagagagttgagaggctcatggctacataacagtactcatgtctaaagtttttctcaggtagttgttttcattatgcctattttgaaagtaattgtggcatattagacactaggatatcagcatgataaaatggtcagcagatttccatacgataatgtaaagcaaacatgattgcaaccaatctggcatttctcgagtcctctcctctgctttccaacaagagggaggaggatgcaagaacgagtcaacaatgatgaacaaaatcagaggttctactagtatcagcatcaagaaaaaccaagagattctggatgcaatcatcaatcgtggcatcgtaaaacactgttggcgcaccagtgatcagtgtatcacttgtacatgtaaaccgttatatttatcagtcaccactaaacaacaaacagtattgtgaacatcgtgtctgaactctgaactctgaaaatggcatttgtgattcgtcccagtcaagtatcagtgaggtacatacctaattcatcatgatcatttgaaatgaggagcggcagtcttcatggagaacacatcactttagctgggaattacacctatttcataacacctgatagtgtttatggtaaaagattattatgagattagctattcaaaaagactaggcttgagcatgttctgccatatgagagtatatgacgagatctttggaatcttcgtcccagataaatattgcagacaaaatgacctcttaaatactgaaattctgaaacaggctcctggaaaggggcactggtgttatgatgctgctcaatgcagttagaaggtcacacgacaacaataaattgcacccataccataccagtggcaggaccagatgcataaatggaaaggatattcagatcaaacaaaaccaaacatcaaatatcagcggtcctgactcatgaaaaagcaatttccatgaagcagaaaacgggaacatcccaataccaggctgggacaaaggaaaaaatcttgaatctgtcgaaaaagttatccttctttctcatgttagaacttagaatatggtacatacgaaatggagaatttcagccatcgctgctatccatggataagctgaactatgcatcccattagtttccaaaatcaaaagaaaacctcaaatgtagttaacacctagagctagaagatgagaagagttaagcaggagtcaagtgactggatcaatcaggctacctggtttttggagtaaaagcagaagtttccaacagctcatcatcttgaaatcttgacatcacagtgctaatactgaacaaaagcagtacatcaaagaccatttcttaattagcttaggagaagtttcctacactcattcacctcaagttcctgaattttgacatctatgcgctattattgtacgaaaaaaaatcacacagagattatttgttttgtaagaaatcttgacatcatagtgctagtactgaacaaaagcagtacatcaaagaccatttcttaattagcttaggagaagtttcctacactcattcacctcaagttcctgaattttgacatatatgcgctattattgtacgaaaaaataatcacacagagattatttgttttgtaagctactaatagtattaaactattaatcaaccaatgatcccgatcccagaatccccacgtttccaacacaccaacaattcatgtatgagtatgaaaattcacaagttgctgtgcaagcaacatgataggcataaactacacaatgcctactactgcaagaaaaactacagaatagtacagagttaacgccgcaagattatgtgaaaagggaaacttgtatgcatgctttcgtttcttctttggttacaacagcagaaagaagcatgcaaaatgtacagctaaaactagtacactacacatcatgatcaaagtaaaggcatttagccgaacacctaacgggggggccaaaccttacagagtttacatgggggttgcgtcgccaccacggcgggtgcgcgattggcagcgcctttgctcccttctcacggcaaggatttctcgccatcagctcgcggaggcggagacggaggcgcggcagacggggcaggcggccgccctggcgagccaccggtcgacgcaggcggcgtggaacgcgtggccgcaggcgggcagcgcgcgccaccgctcgcccgcgcacgcggcctcaaggcaaacagcgcagagctccggcgaggcggaggcggaggcggacgcggcgaagcagggaaggaagcggaggtccgcgggggagaggccggcgcgggagggcgtgtacgaggtctccgggacgcggtaccggctcctcccggccccgccgtggcgctggttccggaacgcccgggccgcgacgacgaggtggagcagcaggatggcggccgccgcggcgaagaggaggaacagcgcgagcgcggcggccatcaccgccgcctgcacgccgagcgacaggagacgcgcgccggcgccggcgcagtccggccgccgccgccggtggcgcctccccttcccgtcctggtccgcggcggccgcggcgtcgccggcggcgggcgggggcggggccatgtcgcgcgcgcgcggccgcgtcgggggggtcgggttcgggtcggaatattcggcgcgtggggagattttttttctttctttggggggggggggggggggggaggcgttgcggtttcgggcggtttcagggtgcacacattgtttggcacttctcgtcacgtacttaaatcccttctcctccatttcatagaaactttttttttcccagaaaaaacaaataagtttgttttttttaaggtagtgtcactttctatcgaagaagaagatagagcacgtaaaaaaaatcattagcacgtaattaattgagtcataattgttacaaagttaaaaatgaatttatttgatattttacagcaacttttatatagaaagtttccgtgtgaaacaccttaacgtatgaaaattaagataaaattgatatcttgatgagaaaataataccatctaaataaaacttctacaagtggagtatagttgattgccctcgagaagctcatccgaatgcgaccgagtagaggcagatccaggacaaaattatagagggaactcatcatcttcctccattttccttcctaccaatgatatccagcaaggtataggtcactcgagttccccaacatccacgttggatccgctcctgcgaccgagtgaaggctagtaataagattgttttctcctatattttgttctctctaaatatgagaatgtgtaagcaggaaatttggtagcaaatcatttcatggtgtaggacaataggtggatgttgtcgtatcaaatttagttttgttagcgatttcgatagtgacgttggagaatgaattgatggagaaaatgattaaggctgttctttttggatgaaatacgtacggacaacgacttgttgataatggatttacctatcaggatggactaaatattgtatgtaaatagcatgaataagtaaccgactgaacgtggacgtagaaagttttagaagtaattaaagaaatcgtacttttaaaagcatggtgtgattaattaatcaatatataaataatttaggctaataatttaaaatgaagggattgtttgagggggaatttactatttgccactctctcaaaatgccagtgctcaaatgccactctcccaaattttcattcccaaatgccacccgggcccacatgtcagcctcactcagcattgggtcccgcatcacttttgtttgaatggaaagtgaggctgacatgtgggcccggatggcatttgggaatgaaaatttgggagagtggcatttgagcactggcattttgagagagtggcaaatagtaaattctccctcatatatagttggctaagctcatactagttccctagcaattaaactcatatatagttggatattgtgttaaaatatatatgttcatcttatatggactttaaacggtgtagagtgatccagattgcaagaaagtaaagattacctttgatcatctttatgatttcaatatatacattcaattccatttactactccctccgtttcgtttttaaaaatctctacgtttgactaagtttatagaaaaatatagtagcactttcaacacaaaacaaacatattatcaaaatatattccatgctagatttaataaaattaatttgatgtttaaaatattgctaatttttctataagcttagttaaacttaataatgtttgactaaaaaaagtcaaaatgacctaaatattaaacggatggagtagtagatattatatgaaagcgccgagcatgggaggcaagcgtgaaacgcgtgatagcaaaagaaaatattgacatacaaatcacacacacacacacaaaattgtgatggctgcatataacatatatactgcacagaaaaatggtaaacttaaaaaatggtaccctctcatttggatatgaagtttaaccattcttcttattaaaaaaaaactcgaatatgtaaaataccatgcttaaaataccttcaattataagaacaagtcttataacagtcaaaatgatgctaaccatttttaaatataaacctgttgaatctttgacatattgtttgtccattctttttattaaaaattatttgcaaacatgaaaaatataagtaatacttcaagtacctttaatagtatgagtaagacatagttttattaattaaatactactccatactcataaaataagtcgtttaggataatatttaagtcaaaccttgggaatataaatcatgaataactctcaagttgttgagtttgaaaatataaaaaatatatgtatagatttgtcttgaaaaatactttcataaaagtatatatattacttttcaataaatacttttatagaaataagaagtcaaagttatgttttggagaccgtgtcgttgtccttaacgactttctttacgagtatggaaggagtacataattaagatgaatggtatttgcaaaagccaagggagtgatataattgaaaatgaaggagagtacgtactccctccgtcccaaaaaagataaaccctgggtttccgtgtccaattttgactgtccgtcttatatgaaattgttttataattcgtatttttattgttgttagatgataaaatatgattaatattttatgcgtgacttgtctttttaattttttttcataattcttttaaataagacggacggttaaacgttgggcatggaaaccaggtttgtcttttttttttggacggagggagtacacaagaaggtgtttggttccacttccttttcagaacccatgaaccatcagctatcagcctatcaacagagtaaacaatggtatccctaacccgtatccatatctaaacagtagagtacagtagcagcggataaggcacaaaacataaataaagggactaggtcccgattgatttgactgaattttcgtaggtagacctgcaacaggatgctattcggttttcccggttttctcggttcccaaaaagattggttttagatatattacaattacaaaagaaaaatcaagccaactaagctcctatttgtttcagcttaagattattataatctttattgaaccatattactataagctagattatagacaaaattggttatatagcatcaaaagttcacgtttttggttttacagcaccgaaagttaccggttcactttaatagcacccaaagttcaccctgttccatttttagcacttccgtcaatttttccgtccgtcttgatcgttattgatccagccacacacacgatatgacatttctacccctcattgacatgcattatacttgtacttgtgaggggtagaaacgtcatatcgtatgtgtggctggatcaataacgatcaagacggatggaaaacgatcgagaattgacggaagtgttaaaaatggaaacatggtgaaccttgggtgctattaaagtgaaccggtaactttcggtgctataaaccaaaaacgtgaactttcgatgctatataaccaattttgcctagattataataagtcgatatagaataaattgttagctgttagccacccaataatctaaaaaaatgcacctttagattggattaccaaattacagtaatctggcttatagtaatatatcataataagctatctgtttgtttcagcttactttcagctatctaaattataataattttaagctgaatccattaaccgaatacattcggtttgccttttttttttctcgggtgatcccgaacaggatgtgaccctttatttgaaatgtacgctagcaagtagctagtaagtacttcctccgtcccataacgtaagagattttgagtttctatttgcactgtttgactactcgtcttattaaaaaaaatttagaattattatttatttttttgacttactttattatccaaagtactttaagcacaacttttcattttttatatttgcacaatttttttaataagacgagtggttaaacagtgcaagcaaaaactcaaaatccattatattatgggacggagggaataacaaacatgctaaaccaaaaaataagaatttaaaatgcacagccaagtgcataaaaagcttatctaactggatagtagatggcacaattccaccagatatttagggtaccagataatatactatactaaagtactgaagtttctaaaatcatacaataatcatttgtctaaaagcaataggaaactcccaacaggtttatcaatagatcgatcatactgcaatacatgtgcacagctgaccggtaacgttacagcaaaactgggttacaagaaactccaacttaagtacttggccaaaactagacttgattagttgattgcaatcagctacccaccaaattcagcataccacagctcacatccaaattaaaaaaaccaaagaaactagtagtggataccccgcacattacagtgggaaatttaaaaatacttcaaagaaaaactcaaagaatataatatataaaccgtgtattctcgtgatatctaaatggactatatttgttctacaattgttgatttgaaactgtaattcaacatgacaattgaatgaatatgtatcaaagacgagagatctaatgggtattagtttttttaggtattatggtgggttgtacatgtatataacaaatggatagttgcgatcgaagtatgagagatattcaatggctactattttatagataatgtgacttaatatatgccaagtttttgtttcaactatatagaatatatatagattaatcaagattagaaaaactatgttccagctcctagtgctagtaaaacgatatctcctgatacatacaagtttttttagggattaagcttggacacaggagccatgggagacttggaaatatacccactttttttggcaaaaagttctgaagcataatccaaagaaaagcaagcaatatttagtcaatgatcagcaacaagaaagaaagaacaacataatctctttattttgtaccttcttcaatctgggccaacctttcaggggagctttgcaggctgcaaacatgggccgcctcccttcgcggacgcagcccatcagcaccccagtttccaaccttcggccttgtacgcatgaaagagatcgtcgaagagagcctcactgctctctccactgtcagatcttccaatccgacgaatctcatccatccatccatcccctttgagccaaaaacaaaaaccacaaagaaacagaagcaaacacggtgatcgaactgacagtgaccgatgagcaacgtttgccgggatcatgcgtaatgcagcaaatgcaaatcagcaaatgcaggcaggagctacaagacaatcgactcaatcaggtctgaccataaatccagtggttacaagtcccaagatcgccatagctaagctgaatgcttgtgtagaatggaatggaattgggtaggaaggagtagtagctaggcagacaaaccatccatgtttcaggggagacaaacaaacacgccagatccctcactgcttcagtgtgctcctacagtttcagtcttgccggaagcttgttcacaaatcgaccagagattcagaaatctctctgctactgctattgctgctgctgctgctgcttcttccgcctgtcatagttatatgtcgttttgtttattcccttcgtctcacaaagacttgagttttcgcaaatctaaaatagatcagtactgtaattctcaggcgtgctaatttaggcgcggttgttttgtctgctggagcccattaaaaaggtaacaagctccaaaagaactcttaaagtaaatttcacaaaactacggatactttgccaaaactatcacaaaattatagaattgacactaaagttatcacaaagctataaatttaaaatcaaatatcacaaaactatagatttaattaagaggaatactatttactctaaactctttgtcggacaaaatactttgaatgctgaaatcagaatgactctttctttagaaacgtcgttctggaaattatctcgcaattttagtacaaccgcgttttctgattgaacacgagtaccattatgttcagagtttgcattgatggtgataatgtatgatcagttgatcactgcatgtatgatgtatccaacgatctcattaaactactcccttcatcccaaaatgtttgacgccgttgactttttaaaaaatatttgaccgttcgtcttattgaaaaaaaattaagtaattattaattcttttcatatcatttgatttattattatatatactattatgtatacatatagttttacacatttcataaaagtttttgaataagacgaacggtcaaacatgtttagaaaagtcaacggcgtcaaatatttagggaatgagggagtattttgttgcgatttgcttggctcggttctctcatgtgatcgacatcaggacagatatctctctctccagtagccgtattaaaaccttagctcacatcacaatatatcacatcacatgggtgcatgctccataatgcctgcaactgcaagaccccatatgctgcatgctgcacatcatcaatttgcagtggcaattgctgcatgatcagcacatcaagattcatcagaagaacaagctgaccttgcatgaactgggaggcattaattcagagatttcatatatattgagatgagcgcacttgttataaagaagaacatcatagaagatctaaacgtactgatgacgatatcaaaacacgatatttgttaatgagaactgcacctgaatgtcgaaatggtgcaagtccaaggatatatagtatgtcaacatggtactagctactaccatgcaagcacagctattgcacgatcgatcaagtgatcgaggtaggaggtgattggaaaaagggtcatgtgctcgctccgagtttggagaggaaacccatgtggccgtcatgtgagctagctaggtaggtcacacagctgatcctctcctctttctcaaagcatgtacactactaccggctaaaacacacaaaaagctagcttggctaggccaagccaagctggtcatgtactcatgtattgaagaacggtaggcaaaagttggttttctggtagtgatcaatttatcatgctatatattgcaaatttaggtacttaattaattgttcagatgcaaggaattatatatatatatgggtaattcgatcgttatagatattgaattacgtccaggggttttccagctagcttcacaaggtggtgggctagtctacctggattcaaagcatcaccccttctaattatttgatattaggtcctttccgaatatttgcgttttaatcctggctcgttgtctgaaattaagttatcacaattttgtttgccagaaaattaatcctcaatgcgaaaccatcataattaactagggtgaaactgtttcaagatagtcagacactccttgtttgaacattgttaaatgcgaaattttaggtacttgggaggtatcaaactttttagataaagtataaacatgtaacttaaaaatcaacttctacatgtcgtaacgaaaaaaacaaattaaactactacagctagttaacgcatattcatagtcaaatttgttttttttaaaattgcgatatgtagaagttgaattttacgtaacatatttgtgaagtgatatatcacatattgatacatctttttaaaattttccaaattctctcataactatttgagtgacatgcaaataacaagagaacatctcggaagtttagaatagtttccccgatttcgatgcctgcatagcaagtctacaaaccgcctgtgaagcaaagacagcacacactcacacacacaagatgcatgccaacacacctacgttcgcttcataactccacaaggttgccaactcgggaggcgacgctacatgtgccgccatgtgcgtcttgctttgcccctattctaattctctctctctcagcttaattgggaccctctcctatctggatcattcaaccaaaatactgtcagatactgtagctagtgtgtcatagaaaaaaaatctatatattaacaattaattaattaagtacatgcatttgtgcacacttgtacttgtcattgtacgtattttcgtcatgtgagtacataacttgcactagaaaaatggaaaagatatatataccttgtattctccaagcatgatcaactactaggtagctactactgcacatgtttatcatttaattatcagctaccatgcctagcttagctagctgttgcaccgtgcactatcttgatttttggccatttaactgttttaattaattaattgattgattgatttgaaactgattaattaaaatgggggtgtccaaatattcaatcgtaccacaatgtagcatgtgtcatgagcagaaaaggagaaagaaaagatgtaatttagaggaccacaaaaacggtggcaattgcatgctagctagctcacaccacatggcgccatttctccattctctccatggacgcacatatataagcagcaaccatggtgtccatggctacctctgccaacctagcttagctagagcctagaggagtcatctccatttcttagcttctctcctcaccagaagccaccatgagaggccctagcaccaccaccatggccaccttcaagcaaagcttcctcaagaacctcctctcgagcctcaaaagctccagcaaaaacaaggccgccatgtcgaccctgagtgagaggaagcgtgccatcaagtcctccgccgacatcgccatggccaccgcccgcaccggcatcgccggagcagcacggtggccacatgccatcttggcatcatcatcatcgtcttcttcatcttcatcttcatcttcatcgtcatcgtcgatgccgagaactacatttccatgcaagatgatgcaagggaaggtgaggaggaggtgcaagagcatcgtgaggaggaggacgccattgatgagtagtagtagtgaggttgcgaggagactggtgaagaagagggacaaggtgctgaggaggatgatacccggaggcgagctcatcgccgacgagatctcgctgctgcacgaggccatggattacgtcgttcatctgcacgcccaggtcgacgtgctccgccgcgtctcgagagccgccgtggcgcggagatccagtgcgtcttcttcttcttcaggtttgtttgattgctgaatttttttgcagctagatcttcttgatgttcttgaaattgttttgactctttttgttggtattttgtattgggttgtttttgtgacttgtccttgttcatcatgcaggtgggcttgcacaattgaaggaacggacggttcagatctctggtgaaacggagaacccatgctagatagtaggatgtgattctgaaaagaggagcaagatgtgttgcagatattggagaaatatccaagagggtgatcagatttatgtccctgatcacacttgataagcaagtgcagaagtgcccggagaaatagaagtggaagagtggtggagagtaatcaagattcgtactgttcaaagatgaatgagaggaaatttgtaagttggtggtactaattgtagtagccacttttgtaccagaagtaaaagtgaaattgattaattataatgcagagagatagtactgaaattactgcccttgtatacctgaaagtctgaaattatgttctaagctaatcttcagcccaatacttctgaagaattaactaacttcatgttcttgtacacctgaaagtctgaaactgtgttctaagctaatcttcagcccaatacttctgaagaattaactaacttcagatgttaatttcagtccacaaaaactctgaaactgtgtttctttaaaccatgtttcagttatgcctgaaccacctgccatttacacgcgaaccgcatttcacaacaattaaggaaccgcatttcataccatagttgttgcaagcttgtagtatcaacagcaatgtgtagaacttcctcgcaaaaaaaaaaagtgtagaactgagagatctcaaacacttttgtttttaagggaaccagcacgagcttgtgctatttcattgaattagaggggaagctatgatccctaggggcaaagaaaattgttaaatctatacagatacagagatctcaaacactcaatgcaggggagaatgtgtaattcagaatcaaacattatgtggatgctggatcttggtgtccaatccatgcagccatgcctgtaacctgtccctagctctctgtcagtggtaggcagatatgggcatttgcctgtgacagaggaaaaaggcaaaatgattttggtgctgtccctgaactgcagcaacagctctgcaggtctccttgctacagtgagactcacatggaaacttgttgtactgaactgaatttgggctgggtgtttggcatcaccagaagcccaactaatttggaataagttcactttaggtccctctatttgtcggtcagtccgattttcgtcccttgaccacaaaaccgggtacgacccgtcccccaacttacgaaaccgggcaaacaaagtccctcggcagtatggagggcagttttgaccgacgtggcgtctacgtggctcctttgactaggtcttcgtcccacgtggcattgacgtggctattacgtggcaattttatctcgaaaaaataataaaaatagtgggacccatatgtcagctacacaaaaaataattaaaaaaaggtggggccatgtggtcctacatgtcagcctcctctctatccccctctctctccccctacactgccaggagaaaagggcgagcggtggcgccgagggggtgacgggcggagcgacgacagagcggagtggcgacggagcgaagcggcgcggcggccggtgggaggaagcggagcgacgatgggcggtgcggcgacggagcgaagcggcgcggcggccagcggtgaatggagcgacggcgggtggtgggcgacgggaggaagcggagtggcagtgggacgaaatggagcggcggcgggcggtgggcggagcgacgctgacgacgccgctcccgccgccccccaagctgagttcgccggctcccctcccctctccttctccactcttggctcttcctcttctttctctcggctctccctcgtccttgcagcggagcggcggcggcggcagcaggccacggggcgggcggagcggcgacggacagcgcatggccagcggcgggcgacggcgcgcgcggcgggcgacggcgcgcgcggcgggcgacggcgcgcgcggcggcgcgcgagacgcgtggggtcgatggtgacgtcgggccgcgcgaggaggcggcggagcaagtggagcttctcgtcctcaccaccaccaccaccaccaccagaagcagcggagccgccatggcacttgcggagctccgacgaggggagggtgtcggtgatatggccgacaaggggagcgcttgcgcaagagagatatggccgccgccaccccaggcgcctcgcgcgccgtcgcccgccgccggccatgcgctgtccgtcgccgcgagggaggaggcgagctcgtcggggcggccggcaggagatgaggcagcgcacgccggctgacgggagggagggagaggagcggtggtgcgcgagcgtcggcggccggtgggagggtgggagaggagcggcagcgcacggggaccagtgggagggagcggcgtgcggcgacccgcaggtgggagggagaggagcggccaccgtcgcttggagagagaggagaggagagagagatggagagaggggagatggggagagatgaggaagaagaggagggatgagttggactgacatgtggggcccacgtgggtcccacctttttattattttttctatgagactgacatgtggggcccacgggttttattatttttctgtatcggattgccacgtaagcgccatgtcagtgccacatcagatgaagaccgagtcaaaatggccacataggtgccacgttagccaaaaccaccctcaaaaccgctaagggacctcgtttgtccggttttcgtaatttaggggatgggtcatacccggttttgcggttcagggacgaaaatcagactgggcgacaaatagagggacctaaagtgaacttattccaactaattttgattgtgtcgatcatgggccattctagagtgggcttttcatttcttgatcatgtgatgtctgaactctgaagtggcaagattaagctgtatgtgccaaccaatttaaacgcaaagtttaagcggccgaggaagaacgtacaattcactgtattttaacaatggtcaatctaccattgcccaattcttttcgggtcctgtttgacattttttttcacagctcctatggaaattgaaatgattattgcgcggcaaagaagaccacgagttgtgtgttttactatattattgggttttttggggtggagtggagatgtggagcgcgaaaacctagctccacccccgtagtttattttctaggagtagctctgccaactccactcaaaaaaaggtggatctataccgtttggcacaactccggctctaggtaagttggagttgagagctagagctgtgccaaacggggcctatattcctaatttcaaagatggccagaagcaataggggaatttgccaccatccgtctgccacaagagatgactcgactatttccaaaccaagagatgctatagggagtttgattaaattttaattaatttaaatcccacggcaaatcgtttttttctcgtacatttcttctatcttacagcacaccaaatcccacaagatcgccggccgttctcgttggcttcgccgctggcctccggcggcggcggtcacgccggcgtgaggccgtgcttgagcgccgccttccagacgacgtcgatccggtcgacgtcgatggcgcccacctcgtggtgctcccacccttccaggaagtgcaccacgccgccggcgtggcacgcgtgcaccaccccgcgttccatcgtgtactgcacacatatgtttcccggcgatcgccggccgaccatgtcagcgaactcggagaagaagaatataataataataataataataataataataataataataataataataataatggacaaaatttttctataaatttagtcgaatctaaaaagagttttgttataaaaaaaggtttaaagtgactgtaatatgaaacggaggaagtacctcgcagtagccgaggccctggacgtccttggggagcctcatggcggcgagcttgccgtaggtgcagtctcgccggaacccgatgatcggcggcaccacgaactggtggaagtgtgtccccgccggcgcccacctctgctccctcggcgacagccacttccccaccagccacgtctgcaacaatgccatccatccaactttagcttctgataaattttacggtatttgaaaaagtaacccgggatacttaaatcttacattaaaaaaatttactatcttgagatacctagtattcggaagtactaaattttacatcagaaaatacggtaactttcgggtaccttcttagatggtaaaattaccctaagcttttccgtcgaactagctagtgcatacaacttggcgccataaatatagctagacccaaaataaacactaaagtaaacttttggtgatctggtcggtgcatacaactgagacaaaaaatgtaactttttctgggttaattggtcagcgggacaatatgactctgacaaaagtctatgttttataggttaactggttggtggataaaacctgatgaaagaaaatgtggacaatcacatcatggacacagccttgaattactgaaacttattgaaattccagcgagtgaattaccttgcagttttgtgcaggctggtacttggtgacctgcacgaggtactgctggaactctgccggtgcttccctctgaatcttcagaaacctctccgacgacaatgtcaacatctaaaaccaaaaaagattagcacacagaaccatcaatcccagtcttgcaatcatcctcttgtttaacatactcatctaatcatgctgtgaattaacacagagttttttttctccttttttggggttcagttcagagttcagacaggcagcagagcacgaaccaggactctgatcttttttctgcagaggtagagggcgatggctctgccgagcttggaggtggcgccggtgaggaagacgtccttgacgttgctggggatctcgttgaggatcacggccgccgtcagggtgttgccgtgcaccaccctcaccctcagctccgggtgcttgttcacgaacagcgtgccacctccattcagtgcctcgttctgacagaaacaagaaaccaaaccaaaacataagaagattcaaagagtttcagttaagatcagatcgttgcactgcattttgatttttgagtaatgctagattgctagcctaaagattctgtttacagtgctgatcagatgaaattcctgaactttttaactgtctgaacaatgaacgcagattttttagttatgagctagccaccgctgcatctactccgattacacgcgtcacggtcgcatttccatcttcgccgccatttcaacgttgaatcagttaaggatttcacatgcccatcataaatgatgatgaattggttccggtagtctgtgctagataaccaatgctgcccaactgtatgggcgacacatgaacagcaaagagactgacatgaacatcacatactctcttttttttccttttttttcttttgaaaatgacagggagaaagttgaagaaagatgaggaaaaacagaacacccctactgaatcatcagcagtgatactgtactagttaatggacaagtatcttattatacatgctgtatatccaatactgctcaactatatgcataacacggcacattatgatcaaagaaagagacatgtacgtgtctgtgtcattgcaagaaagtgataaaggaaaaggaaaaaaaagttgaggcatggaagagacaagacatgtacaggtagcaaatattaaatatacataaattattggactattattgtaacggattatctatatgattatatacataaattaaatgttttaataaataaatatttaaaaaatgtattcttggtgacatgaataaataaataaataaataattcgtgataataatcgaaaaaaaaagctgaaacgaaccagatcttttgtaaaacaactgaccttattgagagcggcgaggctgagcaccttgacgcccatccgatctgcacgcaggatggccagctcgatctgctcgttgatgcctttcttcgccgccggtatgaagtactgtgaatttgcatacatggcgccaatgtcagaatcaattcacaagttcagatggcctacacaaaaccgaatcacatgcagttttctatagggactgcaaagttaaagccacacattaaccactgttgtcactactgtactgtacaagtacttgcgagagaggtgccattgaatagtatggtaccacaacacctctaccaattaattgatggacaacctatgatccatccatgatatctcagttgtcctctcgatacagtcagtacgagagtgtttaaattcatgggtgtaaagttttggtgtgtcacatcgggtattatatagtgtgtcgtatggggtgttcgggcactaataaaaaaaataattacaaaatccgtcagtaaactacgagacaaatttattaagcctaattaatctgtcattagcacatatttactgtagcaccacattatcaaatcatggagcaattaggcttaaatgatctgtcttgcaaattagtcgcaatttatgcaattagttattttttaagcatatatttaatacttcatgcatgtctttagacgttcgatgtgacggggtgaaaaatttacggtgagatcacatactaattctaaaatattgtctcatgttataccgacatgagatatgatataattttaaattattctggaattaagctaggcgagaagagagaggggggggggggggggttattgtgattatacctgaaacccatatcgggggacagtccacatctggtggaggttgccgcggaggcggtaggagctgacgaggaaggtcttggagcagcaccacatgagcagcatgaagccgaaggcgaccggccaaaacgggaggaggacgaagtggttggcgaacggcgtcgagctgcacgaccggagcacgaacggcacgtgcatcgacgccatgatgtccaccacgtgtgccaggaacacgaagtccggcgcctgatcgttcttgcctacatcaacaattgccatttttcgcgaaataatattattataaaaccgtcaagctctcgatagtgaaatgataatagatgtgtgatttcaacccttgaggtcatgtgttcaatccccgcacgctcataatttcttctttaaaaaagtttttttattgtaaaaatattcaagatttttggggcttgggaattttgcatgaattaattctaaatgttaatgtctggagcaatgtctctccctccaaatctctttgttttaattgtaaaaaatcttcaagatttttggggcttgggaattttgcaggaatcaattccaaatgttaatgtttcttatgggtcttgtagcacactgactgaatataattcttgtttcttgaagcaaaaggcataataaaatgcactaattaggcgtgcaccctacctaagtagacctccttttgcagctcccatgacttgtggttgagggtgccccccaggagatcaaaaataggcatgaacaggcagaagtttgagtccttctccctgtggtgcaggctcaggtacctgcgcaattaaatccatatgcataatgcattagaacaatcaaatcgattttaattacttgtatcacctcttcatacaacaccgactaattaatcaacttttctctaacaaccaattagcagtacagctaacaacactaggatagtgaccaaatgacagatgcaattaagcagatagcagcacggtccatacaatgaagtgcagcataattagtactacttgtatctcaaccttataaagtagttatttatttatttaactaactgtcttagacaaaaataatttacttattttctccattttacaatacttgataattttgaccttgcattgttttagtccgatcactcctattttaaaaataaactggtagctattaaaaaatataagcatatagttcccattaattgaatcaaacgatttacaagatatcggtggtcaactaaaataattttcaatccaatttaccaaaagttatgaatagagaagtatttatcagaaaacaaatacattatactattattttatttttgcactcacgtaggggtgtagatgaggtatctgagaagaggaacagcctggaagaccctaggggatatcacctccacgttactgtagcccatggacctcaagaagtcaaacaaaaggacgtgtccatagaccaggcccacggaccctacccccatcagaaaggcccctgcgagtgggacccctatcaccaccgtcagcagcaggctctccagtggcgtcccaaatccagctgcagaccaacgtaacacaggaaaagcttatcatcagccagtcaaaattgtactcctacaacgctataaccgtataaccgtatgagacgtataattaaaaataaattatagataaaatatttatatctacaatgctaaaatatatataaaaaaatcttgctaaaatatggatcacgattaaaaaaacttaaaatcaacttcataattacgttttaaaattaaaatttcaggctagtctcgattaatttaatcttcataaattgtaccactctgatgggttaatcaatgtagaaatactagctccatattttaatgtatgacgcagttgactttttatccaacgtttgaccattcgtcttattaaaaaaaatttatgcaattgtcatttattttattgtgactagattcatcatcaaatgttatttaagcatgatataaatattttcatatttgcacgaaaattttgaataaaatgaatggtcaaacgttagtcgaaaagtcaacggcgtcacacattaaaatacggagggagtatgaatgaagcagaaaaaagaataatctatgcataacattttatatttttattgtttattgtttaaaagtcaatgctagaaaaaacaaactacgacaaataaaacacttcaaaatctatcccaaaaccaacattaagtttcaaaatatctgctgcaactcattaagacaacaaaacatcatacataaactggttcacagttccaacgagaattttcaaaacaaatttggtacaccaaacagttcatagataggaataaatacactccctttttatactcctaaactttgttggggagtatggtatggagtacagtacatgatgagtacaggtgtagagtacctgtcaagggtgtggtgaccgaggcgtggtggtgagcggcgtggtagcggctgaagagtggggcccggtgcagggcccggtgggcccagtaaaagagcggctcagcgaccaacacatgcagcagcagtgcgatggcccacccgcgtgggtcccacgcttgcttcaggcttgggagcagcagctgctgccgcgccaccgccgggctccccaccaacgttgcccctatcagcgtctgcagcagcagaaagttatccctgcatatatatgcaaaataatcccatcaaaaaaagaaaaacacatattgctacctccattctaaaaataagtgttgccgtggatatccgtttctaacatttaaccgttcgtattatttaaaaattttataaaataattagtcacatataaagtaatattcatgttttatcatctaataaataaaaataattaaaaaattaaataagacgaacggtcaaacgttagataaggacagtataaaactatacttatagttattttaggattgagggagggaggtctacataaaacagattcattcttaattttactgctggtgctggtttaagcagtagaaatggtgacatatatgagtagtaattacgatgattctagataagagagcagccatggcgtctgtctgtctgaactcttctgaaggctgaagctgggatctgatctaacagtggatgactggatggtacagtactgtctctgggcttggtgaccactgcttgccttggatgcaaagccatattttctccctctcaaaaaaatcaatctaaaaatgaataggacacaaatgcacgccgtcggcgaccggccggcgactagctagctacggcggaggagaatgagatagatagagagagagacggcgaagggcgtaccagtcccattcggcgtcgacctggcggaagtcgacggagtcggggacgacgcggcggcggcgggtgaagaagagcatgttgccgtaggagaaccagaactggtaggtgagcccgcgggcggcgaacagcagcagcaggtggagccaccacgaccccaccggcgccgccccttgctgcctccactcctccgccaccttccacaccaccgccccgtacaacacatactgcacccatctcccattaattaaccacgcacacgttaattagcttaataaggtagaagaagaagaagaagaagaagaaactaacaaagagagattaattgacgacttaagagagagattatatgcatgccttgtacgagccgaggcttgcccatggccacgacgagagaggaggagcagccatggctgcttgcttagtttgctctctcgatcgagcttgtgaagctcctccttctctctcactttgtgactctaatgtgtggctgctaattaagcttgctagctagtagctgcatgctctagctagctatgagagagagagagagagagctttggatgccacacgctgcgtctccctctctacttataagaagagatccgagagaaggagaagaaggggacgacgcgcgtgtaggagacgacgacgaaacttacatgcgccatattaggttggcccccacctaggtacagtaattagggtatttgttccggagacggctaattaactagattattaattaaaacaatatgatgataaaatatgtactatatatatatggactaattaattaatgactatatcctccggaaaatacgaccagatatatactcctattgcgtaatagaccgaacggttgtacaagaaactgatttggtgcatctattgatctaccgcgccgtggtcttaatttccagcttattcatcgggtttttttaatgaatcatttgttttacgcttagaaaattacgtcccttttttttaaaaaaaatattctatcgtactcctattgctttagaccagtcatttttaactatttgcctagtttacttttttcttaaaatatttagtttatctctgtaatcaagtgaataatctggatcaataattcacttaataatctaaaccaaagaggtatttatattttgactgtgtataattattatccactatctttaaaaaaggattgaatacatgattcatgatgaatgttagtatatcttctactatactagtcggagcaagtaggtaatggcagatgcaaatggtataccggtccagctagaaatattactgtgctataattgaccatgtccattgcgttaaattcttacaatatggaaacatgcaaattaaaacgcgtgtttgcatatcaggtagacgatagataggagtacatgtgttactcccattaatatcatttttcctctttttgaggaccaactctgagaacggtatgtgccattttgcaactgcaaactaactgtccataaacacaaacattaactagtaagtgcatgccaaaccgatgcacacacaccaccagctaggggagattttgacacctgcgccgcgccggccagacaatgctactaaatgcagatggagtatacttctctcctcctgttcttgacaacataatactagtagtaccagtacacagatcaagagtaacttcgatggtatagataactgatagctataactaacatttgtcacgttatttataaccaatttaatatatagtacacccaaagtgtcccaaagtcccaaaatgaataatatagctatagcaaatgtgttttgtggatgatatataattcctggcgtttgaacatttctgagaaggttttatgtcgaatttgcccctgtgtagttaattactctctccttccctgtggagcaatttgttagtagtttaaaaatgaactaatgaatgtcaaataaataaaaccacagggagtagtactatcttaatggtattgttgttttcaatatcaatgctttgagtactgtagtgcatgactattcaacttcattaatggtccgtatggtatgatattttggttgatttaatacgggtaaaatagaaatagttacctcaattaatcatgtattggcatgtaagattatattaaaacgtaaataattatgaaactaaaataatagccatatacatatggacactattaatgcatagccatgttatttttctcataaagcttattgttgaagtattggaggaaaaagtaaaaagacatatttgcaaatgaaaaataatttatgaataaaacttttatatacaatgttcttaacgatctgaaagcaaaggctaaaaataaggataaaaatttcaaaattaacttcagatttaagcttaaaaatttaaattttgatcaataataagtataaatataggtgaaaaaatgaggatactatgggcctgtttgggggagcttaagattttaagaagcaactggttggtagtcagcttcttagaatctggaaaagccgggtttcccagtttctggcttctagttcattttctaaattctacaactacagcttctcagaatctggactaaaagctagactgtttgtgggagcttctgattataggagaaactgcaacagctagaaactcctccaaacagaccatatagttggctagagatgttgtagcctttctctcatataaaactcttgacacgaatttgatatagtaacaatttatcccctcacaccaccataccaccttgaacacatgcacaccataaccagcctgaattgccattaattttgataatttgactctttgcaaaaactaattttacaaataaaccgccgccaaaacttatttcaaaaatgacccttttgttcagcgccaaatagcgtggcactgaatttagatacctcagcgctaaatagcgtggcgctgaatgtacgttggcacgttgactcagccttccatccacgatggcacgacattcagcactagatgatgtggcactgaagtgtgtaagttcagcgtcacacgatttggcgctaaaaaaaagggtcacttttgaaataagttttgacggcggtttatttgtaaaattagttttttaaaaaggtcaaattgtcaaaattaataccggaattgccatatggacctatccaatcatgcaaccatgatcgatcaatcaatccaatccaatccaatccaatccaatgcatgcatgcggcgtcatgactcgtgccagatttttttcagggctcagaacagatttcaggattcaggcaggcagcagtagtgtgctggcctgttgcattcgtgcatgttgcagcaacagccacgcgtcagccttaattaaatgccgccgttgacgagctgtacggcatactagtagcacgtcgaatggacggccccgatctgtgtctgcttctttttggacggatatgatgatgtgatatgcatgcgtggtacactgtttattttctgcctatcatatagggtgcgtttaggcactgtttagtaataccaaaacttatctgaacttctaactttccatcatatcacatcacatctaaaacttttctattcacataaacttctaacttttttttccaaactatcaactttccccaaacttctcttcaatttcatgaactaaatacagccttagttaacgttaaaattggaagtttggttgaaattgaaacgatgtgacaaaaaagttggaagtttgtgtgtaggaaagttttgatgtgatgaaaaagttagaagtttgaaaataaaatttggaactaaacttggccatagtagtaatttttatcatgatttttgtaccacgttttttaaacaactaagtgtattctgtgcgaaaactttatataaaaaatattttaaattattctaaatttataataattaaaacttaattaattatacgttaataatttcattgtttttcgtgtcctaatttcatcttcaatagaaataacagccaccttagctaaatgttggaggatatggtcaacttatggcagttgctctcaaatcattctccctatgtagtttatgttattgaaaaattctaagaattaatatagtatagaatataaaaatgaactaacttagagattgaaaatcctagctttttttatttttattggtcggctaatctattatattattaaaggaatagaaaaaggagcctccacgttcactcttatggcctagaaattcccacattaatcggagaaaaagaaaaaacagagtccatataggaatacaatttaaaaataggtgaaattcggaattagaaaataaggaatattagaagaggagactagagtccatatagaaatacaattaggaaataactgaaattcggaattaaatataaggaatattagaagtagagtatagagtccatatagaaatacaattaagaaaaaaaaagaaagtcggaattaaaaacaatgaatattagaagtaaagtatagagtacatatcaaaatacaattaagaaaaaaatagaaattcggaattaaaaagtaaggaatattagaagtagagaatagagtccatatagaaatacaatttacagaaaattcggaattaaaataaataaatattaaaagacgagtctagattccatataggaatatatataatttacaaataactaaaatttgatattaaaaataattaataactaacacgtatataaaatacaatatgaatatgacacattagtagttttgtaaagttattgtaaaatttaaaattatgtttaaatataaaattttaatatatttgaataatataatgagaaaacatatatgctattatatgagagaaaatataataatactagtcgcgtaatctgtacgggccatcatgctagataatactaaattgtaagcggcttatcagaatctgcagctcccgaaacagcggctgtagcaacttagctttcgtttggttggtgcctgtttgggcgccggtgggtcgagaattgattgcaaagttaggagtcgtagcactagcaatcaattaataaacggcacgacggcgaggacgacggagagaagtagtgtagtcctagtgctgccattgttgcaggagtacacaggttgcaagtacaggccggcaatgaatgaagtgatagataggtgttgtgcatttgtgcatgagagcagttggctcttcgctggccccctgagtctgcctctgcctccctgcctgccgccggatcattcacggagctctttccatgtgccgtttgttatactgctactaaaagagtaattctacggtgctctttattggtagactagtaaaattaatctgaaccctctaggactatgttcggttgcacttatttcaattgtagtgtagccaattcgaacagtcctatgtgtttgttgctgcagcaataaggggtacattgtggtgtagccgaacagagcactttcatactactactttatcttctcgttttcccatgtcgtttaaaaattcattaaaaagtctagaaaactttaataaggcatgtcgatatatgatatgtcactcaacaaacgattcaaattcaatttggagagtagaaacgccaaaaagagtaaattaactgcatattggattagttttcttaatttgccaaaggtttcgccttgaactctcttgcacatttttttcacttttgaccagccttgtttactcatttttttgggtttggtttggaccaatggcccagctgtcagatcgtctatatatgagaacaaaaaacggcttccaaggaaagccctggttgtggagactggcgagctccctgacgaaatcctccaacgccatctacttggtgcaagttcgtcggcaacgagataacccaaagtgaaagtgtatattcggtgtaaaagtgaaaaaatggttcaagatgcaactgtggtaattactagttcgtcgtgcaaattcaaacaaaaataaataaattttactgcaaatcgttattcgcggtcaaatttgttgttttgtgtttctagtttaacttacatatttatctgttttgttaagagaaattaattttcgtgatagctatttagacgtacgacatgtataaaacggcgggaaaaaaatccacaggccgggcagaagcacatcattgtcaaagcactataaacagtatagtggagtactaactaatataggctgtgtttagttcacactaaaattaaaagtttggttgaaattggaatgatgtgacggaaaagttgaaagtttgtgtgtaggaaagttttgatgtgatggaaaagttagaagtttgaagaattattttgaaactaaacacagcgatagtaagtgatgtataaatattgagttacctcataatcaacgaaaaataatagctgtcgatgtataatatctattggatgattgcgagacgacgcatgcaaatgattcaatggttcttgttttgcgaacgatgtggcacaatacatgtttagttttcttttgtcttaattagcacaacatagtatagtagataaatgaggagaatatctatttgccactagtatacgttttagggcatgtttagatccatttgaaatgttaaatggcaaatggcaaaagttttggtggcaaaagttttggtattgtaaaagtactagttggtgtttagatgcatgttaaagttttgccattttagcactaaagtgagagagagagaaagaaagagggagtggtcccgaaacactttttggcacaatttgctactatggattagcaaatgtcaaatgccaaattaccaacttttgctactagtgtttagatccaaaatagcaaaaggtgctataaaataataaaacttttgttattttagaggatctaaacagtgcttcagtggttgggaagcataataagctgcaggagggacgtgggtagagagagtaattaacgtgtcgatgttggtcgtctcaactgtcaaccccatgtacccatgcatatatgcgcgtacgtcaagccgtcaacaaagtaggattcaacatgcatgctagctagtcaaaacgtgtgtgggtgagcaccggggcgttgcgtaccgctgtctcgccatgaatgatctaccgagtacccatgcatacgatgtcggcgagctaagctagctagcttgctcaccaacggtatatcgtcgaccagctcgccggctgcctgagccatctgacattgtagtcatatttagtgagattttgatagctatagctttttttaagctttcctaaactgtttaactttttatttagatgctaaaaagttgtggttatatattctacagaataaagtgcaaggtagaagtaagatgctgtgtttaattgttagctccttgagattctcataaactgttactcaaaatattaaacacaaataaacatatatatttttttggaactatattacactatatagtgactatgggcttattcacttcgttacaaaatccaatccttttaaatttccgaccttgatcaaatgcgctagctactgcgctgcgataacgaaaacttagagcaagtttaatagtatagtcaactactagctccaaatcatctatagccaatgtaatagccaattcatacaatagagacttactacactattaatatatggtcccacccatcatattcacattacgtcttgaagtccgtgatgcagctggctataaatctgtagcccgctgctcttctctctcttcttttatctctttaaaatatgtttatagctgacttatagtctgctattgtacctgctcttataaaccaacaaactaaacatgcatgcatatataacattatattaccaacaaatactaattaaattttggtaattccgaaactagcttcctactctcaaaatttctatcaaattttgataagatatcaaaccaaatactactcaaccatactttaattatcttattaaaatttgataacactaaaatattttttttctatttggttacactattatttatgggtgcgtcgcatgcttatatccaatacaactgaacacaatcctttttataatgatttaaataaggcaacaaggacataactacaccgataatattagctggatagtattaaagagagatacccttaacgggtaggtacactagcattgatcgaggatgagatggtgaacagctagatttagctagagagatctatcgattctcatgaaaggggacgaataatgctgcccagctgactcgctgaccgtccagtaatggatttggctgcgcgcatgtactgtaatttctgtgattcttcacaggttcagtaacaacattacacgatggatggatttgttttgatctgtccgttttcatatgcatggtgtttgctcgctgacaggctagctagcttagctttgctctgccagatcgatgcatatccacgaggccttgtcgccaaaaaaaacaacatggaccagacgtacacgtgtccttttgatctgcgcgcaatatatgctgagaagcagcggataaaattttgaaaaacagagggtttgttcactttgctattattttcaacattactaagttttggtattatcaaattttgataagcttgtcaaaattttgataaggttaccaaattttgacaagattttatatgtatttgacaataaactaaatgtaaacactttttttaaactttactaaaacttggtaaagttgaaaatggtaataaagtgaacaagtcctgagtttttatcaggttcttgctactaatttattttctaaaattatctgaactgttttagaaaacttctgaatacattactatggaagatgttacagccaccgaaacatcctcaaacagggcctacatgatgcccgaacaagacgaacattaatttacatatacaagtgtagttacctataacgcaaggtttaatttgatccacgagaccatgatttcaactttaccagtttgaaaaaaaaaactattattaatccgcgtatcacagttggatgtcgctgaaacttttacaaaattaaaaccgtgccattgagaagaaaataagagaatgaagaaaatataaaatgtgacaatgataacacgattctagttttgtaaaattttaataatattttgctgatatcgtgaacagtaatatcatcgacaaattaaaacggcatggatcaaaaactaacccatatcgcaatggtagttcgttcctctagctccgtgtggtgcctttgtgtgcatatacgcgcccaattagagcaggtacaatagcaggctataagccagctgtaaacatattttaagaagataaataattagaagggcagcgggctacagatttgtaaccagttgtagcacggactccaagatgcagtgtgtgtatgataggtgggactacgtattaatagcgtgatatataactattgtatgaatgagctattatattgactatagataaattggagctagtagttgactatactattaaacttgctcttatggacgtgcttacagccgtacagatggagtaattaattaaggtacccacggaggagaacactcacgggagatcgaacagtgatcgcaagcacgtacggcgtagtacttgctagcagcttgtggctacggcaattttaaccatttaatcactgcaaaaaggcgtactttgctagggcaattaatcacttaatcactggaaaaaaagcaaagctacagtaattgttggttgcgatgatttgcagtggagttaattattggttgcgattgcgatgatttgcagtgctggtttgcgtgaggacatgcagatgcagagggattttgcctctccggcctgttgtttggtgggcccggcctgtgttggaggtagtggcgtgtcttcttgcattgtgagcccaatttggtggttggatcactcccattcccaggcccgtcctgtagaatattctagaacaaggccgtgacagccaatacaaaaaaattgaaaaagtatactagcttattctagcccaaaggccgtgagagccaatggaaaaaactaaaaaaaaaaagtgagacaatggggagaaaaaaaattccgttgccgggactcgaacccgggtctctcgggtgagagccgagtatcctaaccagctagactacaacggattacaagctgatgctgtacaattatccattttgatgtttgtaaagaatcacattaactatccaatgtatcctaaccagctagactacaaccgattacatgttaatggagtacaactatccagtgtcaatgtttcttttttttccatgtcacggattatatgttttacaattgtattgtttagaatcgtatcctacataggccaaagattttgaagggaatgaaacacacacatggaaaggaaatatacgccgtgaaatgccatatattttaaaattgtgtatggtttacaatcgtatacagatgcatgcatacaaaattcatcaagccgatgtgattgggtgaagatcataacacggatggcacgcgcccagtagagctcagcagtacagtcacggagagtatataagtggcgatctttttttccaagtttgcccgtgaataaccccttttccttcgccattggaaagctggaaaagcgtacgtctcctttccgttgacagctcgagctcattcatgccatccatccaccgtccacgcacttttccgcacagtgcagccgcaggtacatcttcttttaaatggagtatttcgttttcatgcaaacatttgctgatttcttaccctccatctgatagatcggccttccatcatgccattgtgaccgtccgatcagaaatcaacggtcatgattggttcgacggtgcgggaaagcaccaacaatgtagtgatggagttgttaatgcatgacctcatccatcagaattcaaattatggatttattacgtaaatgcaagtgaaagctttcaatgcgactttagcaaaatcacagatgtgctggatttctatctctttgagccagtgataaagacagatgtacaaacttgaagggaaacatcaacatatgaaaaagcttaattaaagcttttctaccaaagaggagaaactaggtaaaagttataaaataataaggaaatacttataataaaatatagttgtttggtttggttacattttagaatcaactatagttattataactcgacaaattaaatcatatacacacataatatctaacaaatccaaatgtgtttaagaaatttttgagagtacaaggtgtatccggcctatgctttgagcgcgtcttagggaatgcaaatcaaggatgtatgagtgtggtgtgttgcgtgtgcgtagtgatcatgtgtcatataataaaatggttcaatcgtctgacaaggcagggtgcgattcttttaaaattctatgtaactaaaagttgaattagatttttttaatcactatatactagtcgtaatattagctattatgcggttaagttaccgttaccagagcacaacgtaacgtggctatgcattgcacgctagggttcaagtgacagatcggttatataaactgctaaatggaccgctccattttccgtgcgcactgttcgtgttgaaaagtactacctccgttttttaatagatgacgccgttgactttttatcacacatttgaccattcgtcttattaaaaaaaattgcgtaattataatttattttgttatgagttgttttatcactcaaagtacttgaagcatgatatatatctatacatttacataaatatttttgaataggatgaatggtcaaacatatgttcaaaagtcaacggcgctatctattaaaaaacggagggagtagcaggaacaaacgcggaaatgcttcctatcagacgtctgacgctacaaacaaaaattggacaggcaaactactacttccctatccactccacacatccatacatgttataatgatatttaaaataattttacttctgatctacttatctaatatatgatatgatcataccattatatttattataattaaatctttataacaagatatcacatcattatattccgatgaaagaaaaacttatgtttcaatccgttaagtttaatgtttcagacacggtagcaatatgtttcattgtgagttttcattatgtttcatagaaaagttaaatatttcagtaacttattttttttgtttcaccacgtacaatgcttcacgctgaaaaagtatgagacgcatatgcctcacacacacacactctctctcatacattttattgtctttctccccacaccatgcatgcatgcaactatttagtgattttaaaaaatcttttttcttccaaactacttaacctatgagcgattcgatcacaccgttgaattcgctataattaaatctttacaacaagatatcacatatgattatattctgatgaaagaaaaacatatgtttcaaaccataaaaacttaatgtttcatacatgatataaatatgttccaccatgtgtttttattgtgtttcacaaaatttttatatatttcagaggctgatttttccatttcaccatgtataacttaatgttgcactaacgctcaactgaaacatttgtccgtccgattttttttacaacatcggacgatttggatgtccgatttgtagctctctccgaacaaacgcagccttaatcccgtgcaccagcgcgcgcggatctcaccgtctccgatccgatataaatatctctcgcacttgacgcgcgcgggcgtcggcgacgcctcgtctcgttctcctcctccttccttccttttcccgaccatctatcctccccttcctttcccgatcgcccgcgcgcgcccacgagaaagattgagaaaggaatccatgcgagcaccgagccatgcgaaaaggaaaatccggagagtgctacggctcgaacgtccggcatcacaccaaaaatcggacgtctaaacgagcgcatgtgagaacgaaccatgtcactgtaacgtatgtgcatagaagatgtttcttttcattctttcctcctctctttaaatatttttttctcctaaattacttatccgatctacgatccgatcacaccgttgtattcattgtaattaaatctttacaataagatatcacatgattatattatgtcaaaagaaaaacatgtgtttcaaaccgttagaacaaaatgtttcatacgtgatagtgatatgtttcaatatgtgtcttcggtgtgtttcacaaaattcctgaatctacctgctactactctctctccacctcatgcatgcatacatgcatgtattttagcaagcttcaaaatgatttttcttttaaattacttattcaatctatgatccgatcacaccgttgtattcgttgtaattaaatctttacaacaaaatatcgcatgattatattttgatgcagagtaatccaaaccagagtaatccaagaggtcgaatgtactgatgcagccttgaacgacgccgacgtagacgatacaattgcctggactggtggaacattggacttatcccttcgccggagatcgaagacgatgcagccccacgtcgggtgccaagttccgtcggaacgtaaaaacaaaagtagaagtaaaaagggtggcgatgcgccgaattgtattgatcgtgaagatagattacatagactccgggtgtacatatttatacccatgggttgatacaagtccttgtcggacaagaaagaaactaacctaaagataaaaggaaaacataaagtctttatcggacactaaacacactttcctaaagataaaaggaaactaacaaactattcctaattaatagataaattgccataccacatcctctttaaactcggtcacttattgataagcttcctttagtagattgatttccttaaccgaatatagcaggaatccgactattggcgacttgataactcccatcggctgattccgagatgctgcagccgataatgattctaaaccgatgacgtctttgccgattaccaaatttcactgttaacagttgccaaggtggcatgaggcgccattactttctctctcttaatcaaactttaaacaaaattttattctaaaatatatatccaatctataatttataacaagatctcacatgaatatattttgataaaaatatatatgcgttctagaagaaaacaaacttatgttgaactatttaaaaataattctttcatcacttgtggagatgtttcaacccacttcacaaattgttccaaagaggtacaacatataaaaagtattgacggcaacaataatcattattacatgaaacattaagtcccgactagtgaaacattttttatatttagattgaaacatcgtattataattaatgtttaaacataataaatgtatttgctgaaacatataaaaagggatagcatgaaacattgctaatgaattagtgaaacatcaacaatgcttgttggaacatttcagtaacaatgtgtgcaacatttgaaaagtaaatttaaaagtcgtcggaatatagtcatgtgatatcttgttataaagatttaattgtaacgaatccaatgatataattagtttgaaattcggataaatagtttaagagaaaaaatcatttaaattttaaaacatgtttgaatgcatgctccgttggtttgtcgtacacctaaccaaccgtttcaccatgcacctacactgttgttattttagattgagacgtccaattttttatttctggccggacggccgatggtaagcattttcgggaaaatcccccttcttgcgatcgatccatccatcgatttaaatcgatctccgcagcttggcctctcgagagagagatcgggatcgagagactacgaggtctatcgtccatggccgatcgagacacatagctagggtaatttgttgtgtgtcgtggtggggggctcgatcgatcgatcgatctccatggagaaggggaagaggcggggagggtcgtcgtcgtcgtcggggccacaggcagtggcgaggaagagggaccagttccccagccgggccaaggactacgagctgctcgagccggtcggggatggcgccaccgccgtcgttcgccgggcccggtgcctccccctcggcggcgaggtcgtcgccgtcaagattatgaacatgtcgcagcgctctgaagacgatgtggtacgtacgtatgtccatttcttcttcttcgtcgtctctggatcatgcatacttgcttatgcgagtcgactgtgtcgtgtcattggtgcatgcagcatccaaactcatgcaaacttaagttcatcagtaatttctagtaatctagttgcatgatgatttcataaattttagtggattataatttttttcgtaggaattatcacggccctgaaggttctaagtttatgcatgttttccaaaatgatcagttaagtctttaggtcaaaaacgtaattagtatttccaaaggtagaatagaagacatataaaacaaaattgtatactatatgcatactataagcattactgaatatcaaatgaacttgatacacaaattagacaatgaatctgaaggtaggcttaagtataagtttatttacttaactaatacttaagtcttcgagtcgaaaagaataactatttctaacaatggaatataatatctacgtaacaaaattgtgtatatcatgcatactgcgtgcattactgaatatcaaataaacttggtacataaacaactaagaagacttaagtataagttttacttattaagaggtcttgaagtcttcgggttaaaaagagcaactatttcgaaaagtggactagaacctatacatacataacaaaattgcgtacgacatgcatactgtgagcattagcccctctctccctctgtccctggaaaagcgatggtgctagcattcatgatagcaagctaagcaatgcacatgaggcattttcccaacacaaatatctctacattgtatctaaataagcaacgtaatcaactctttgtttcgcataatgaatttaatatatgtctttgggtgaccgtcaccctggccttaacttacttcttcttactaagttaaatctgctatgtgtttgggatttagacataataactaattaaatttatagtattgcattggagatgacttcacaacgaaacagtagatgcgagtgttgatttgtagataattgtagtcttattaataacatggttgtgcatacctctagatgcatagtgtgcaagaatgaaattatgaacatattactcgtcagttgtattgagagacacctatatttctttactttctgcagaatcatgcctctgaggaagttaaaatgatgagtactattgaccatgacaatctccttggtgcatattgttcatttacagaaggtgaaactttatggattattatgccctatatggctggtgggtcatgctttcacttgatgaaatcttcatatccaaaagggtttgacgaaaaatttatagcatttgtcctacgcgaaacattagaaggcttagcttaccttcatcgctatgcacttgtacatcgggatgtgaaggtatgaatctttctcatgcagagtttaataaatatgaattaattcataatttatatggctaacatgtattacggtaacacaccatatacttcatacgtgatcttaggctggcaacatactccttgatcaacacaaaggagtgaaacttgctgattttggggcctcggctagtctttatgacccaatgattaatagacatggtaaaagaaagactcttgtggggactccttgctggtaatttctaaagaacagaaaagaactatttgtgaattttaaactacccaagtcaatttaatgctaatatactatttattttgtttttccctttaggatggcacctgaagtcatggagcaaaaggaatatgatgccaagtacttatcaattttgattattggcttatcatctttcagttaagaatgagtgtttttatttttatatttttcaataaaacaaaagtcaactgtagggcagacatatggtcttttgggataaccgcacttgaattggctcatggtcatgcacctttttctactcaacctccagcgaaggtatttgtttagtctaaattttttattttttttcatagcatcatgataacttaataccttttatcaaatattgtataggtctttctcttgacattacaacatgctcctccatcacttcacaatacaaaggataagaagttttcaaaggttcataaatatttatatggtggctcaatatgtgtatttttaactatactaccttaattgtacatttgttttgcagtcctttaagcaaatgattgccacttgtctaatgaaagatccatcaaaaaggccaaccgcacaacatttattggaactcccatttttcaaaaaggtaaagtttgaagacaatgttttgaaatccgtgctaaataagttgccatcgttgggtgatcggatgcaaagtatacaggtatgatccctacatcgtcctatcatagtcaaatattcatcccttcataatattaaattctataagttattttctgtaggagaatgaagcaaagctgcaagctgagaaaaaacctcttgataaatgcaaagagaaggcatcacaggtttatagtactaaaaatatactttgcaatttttgttacactaacaacattgttatgacaaatgcattttctctaattttcatttgctagtgcaattattacttgttcacacctataaattgtattattgctattagaactaatgaatgcatctaaattggtgctaacattaactaagattatgtgagatcaggttgttatataattttaatttatggtaaccgtcattatctagaaatcgatactattgtaacaatctttgaacatttttttacgtacaggatgagtatatgagaggagttagtgagtggaactttgatatagaagaactaaaggcacaagctgcactggtacgagtatacttttttttgcaaaggttgtaacaaccttttaactattaactatataaagttttttttgaacaatgtttagtacccagatgagaatgatggcggcgaagatgagtatttgcgttttctttttgaacttgatactatttgtgaaagtgctcccatacatgacgttcaatcacgagattactctaaaaatgaaaatgagaaggtaattttatttttgagattttttatttttattttagtgactatgttaatatatacatatatctaataaaagtcacattttcagaaggaaagcaatgaaatcacaagaaatgagaaaatagatacgacgcccatacttcaaaggttcatcatcgacttcattcctttcacaatgtttcatttttttaatacaataataattttcattaaaataattatgcaaatcatttcacaataataggtgttccaaatatgtattctttaacaataaatgctcaatgttaatgccacaatcttttttttgagccaagtatgttattgatgtaacaactctcataagatgtttacaatgcattgtgtggttatttgaccattattgtgttttattatatcattgccctctacttatattacatacaagctctatcattttggttggacatgatttatttaggaatgattccatgagattctgatgtaatcgcaagcataaaaaagtttaatacatcatatctaacttagttgtttatgtcagtgtgaaacaacttgagaataaaggaagccctaatggcctcgtgcgccacgagtcatttcaacatcgacccaaatcacctactaagcaaatcacaagagcaggcatgtttgtacatttccttatcccaactaaaaaagtggcggttaaatgcattataatagttttaaattaagtattgggtaattagtattgttcatattttcttatgcttattattgtttcacacattttaaaactttgcattttgaatatagtataaattttggagtggtttacacacattagagcaaggtaagaatgatttgttttttgcagtatcaaattgcaaggactttgatgaatatcttaaatcggccattcagaaaggccgttttaaagtgacggtagaaggtgctgaggttgagaaggtaagtcttttattatacgaaaattttctatatgtgatcaagtttttaaagcattacttttgacttgtttattgcatgatattttctctaactataagtaggggtaaaacaagttatatgtgacatggtactcattttgaattagtttatatcataattactagtttatgtgcttatttttgttcaattcatttgtccttctcttgcaatttacatgttttggtagagtatattcgccgagtaaaaaaaaagaactatcagacgaacatcatatttgatatatatcatttcatatatagggtataaagtcattttgcatgcaccctaagttatgtaatgccataatcttcaatttagtttatcttggtcatatgattatctatattatgtatgtttcttaatttgtagcttcaacatatctagttttagttgttaacaaattgcaatccaataggcttatgaactagttaacgtataaatgctattgttaaacattgataggaacatttttaaagtaaccatttgaaatcttctttgtggcagttggaagtggctacaccacgagaaaaggaattattagaacggattgctagtttggagcgaatgtacgcctctatttgaaacaactttcactatcttaacatataattctctagtttaaagtgaaagtaatttatttgtttataacatcatattttgtaaccatatatctttgtaggctccatgatagccaagaggaggttcagaggcttagagaaaagggtaattgtaattttgtcctaaaattatacttcccagagattaagaggtttactttagattcacagtttatattttgttccacatgctctttgcagagataaaaggagcaatgtcatgcccacagctacagtagcaaagtccaagtacaacccaagttagtctggaaaaagtacaagacaatttctatcttattaggtggttcttggcataacattgagcaatgtcaaatgctctagctgtcataagagagtgtatagttttagaaaacattatgacattatgtcttagttataatcttagctcaccttctattttattgtgtctaaattagacatattattatctagaagaaaaggatctaggagtgcaaatttgatgtttatgatcattggtcaagcacatggctaaaatagagcacatgttgacgtggaaggctaacttatttgcttgttatttatgtgcatgtttccctacgatatgtcaccgaagacacatgcatcttacttgtggatagggtttgaattttcttgaacaacatctcataagcttgttccatcttgaatatagttcaattatcaaaaaatatttgtttttttaaaaaaatctcgctcagtattttccacggcaatatcttttttccctaaatatactccttgttctcccacctagttccttacaagctagcactagacaatgcatgcaatgcaagttgcaacatattcccttcgttctaaaatagaccaacttctagtgtttgaattttgtcgcaaaataaaccaaggcctatcttcttatctaccatcgatccataaattgagatattttatttcttcaataccccttacccaccctacaaccaatacaactttcttattataggaattttatagtcattgagaaaataccttaaggtacctaaattttacactaaaattttttggtaccttgagatacttagtacctagaggtaccaaatttttacattataaaatatggtacctctaggtactttataaaggatggtaaaattacccttcttattaatcaaggatattttggtcttttatctctcctttaatttttcttgatgcttagggtttgggttttattggggcgcaattcattacaatttaatactacgtccatcccaaaatgtacgatgttggttagttcatttttaactaatcaatatcatagggagtaatataatacttatattttgaattctaatgttcttttcttctatgaagttgaagttagcgtatacaaaatgggaaaaccattagtgtatgttaaattaagttttaattactaaagactggaagaataattttatttgatattttaaagcaacttatataaagaaaggcttttaaaaaagtactgtttgtagttggaaaaacgtgctaacgaaaatcgaggtaaaatctacatcttaatatgaaaacaatgggccttaaaatgattcataatagcaagtttagtaaaaggctataaaccaattgtaaactcatgtgaaggtgagagaactagaaaaaaaaagaatgttggctctcattcgaaagctaactcttcacatactgcgaaataaatatgctaaatgtataggtgagagaaaaagagaggagaagaaaattagagacaactttataactaatctattatatacgtcagttttatatgggtttatagctgatagctggtttctacttttaacttgctctaagattttcaccaagatagcacccaaccgagcgattcaggtgaccgagccgaggccgcctcaatctccgggcccatcagctgcaccacgtcaccggcccatacctcactatacatgggctccctgccgtgctccggcccaacaaaaagatggcgttaatccatctggacctctcgccgccatcaccaccctgcctggcgagagtcccgtgcacgcgccttctttaccattacgggaagaaggcaaggacaacggttggggaggatgataaggaggaagaagagaggtgtatagaggtagatgtgctaatacatggggcccgcatgattcccacgctatctcagtcgtcacatcagtcaacaccaagagcaatactgccttgagagtccaaagttgggacccaatacgacccggtttcacaaagattaggaatacgctgtatctgatattccagtccagagacgatttcgaaaatcgaggacaagacgagggaccccaagtgaactttttcctatacacacggtactagtaacccaacctagagattcaggcctggtcaatctccaggcccatcatcagcttcgccacgccaccggcccatacctcgccgggacatgggctccccgccgtggtccggcccaacaaaaaataaaagatggcgtgaatccatccggacctctcggcgcggccacccccaccaccactccgccattcccggacgcctccccacctcacgctcctcctccttctaataaccccagcgatgggtgggagccgagcccttcccctctcctccctcctcgccgccgccaccaaatcccccctcctccaccaccgccccctcccgctccgcctcgccgcctccatgtcgtcgtcgtccccttccccctctcccgctgctccggcctccgcctccgccatcgacttcctcacgctctgctaccgcctcaaggtgacgccgacgccgacgcgcgcgacctctgctctgtatgcttcctctgtttgtgccgccatggggattggcccgtgacgccgttggtgtgtgcagacgacgaagagggccgggtgggtgaggcgcggggtgcaggggccggagtccgtcgccgaccacatgtaccggatgggcgtcatggcgctcgtcgccgccgacctgcccagcggcgtgaaccgcgacaggtcaagcgtggggattccatttccttcttggctcctagcgtcattcatgtcttggtagcgagtttcattgttttttttgcaggtgtgtcaagatggcgatcgtgcacgacatagccgaaggtatccaacattttcgtttgcttgaattggatctgtacggtgattgtgttggacatgtgcatgccgtgggtgggttgtgttgaagcgggggatttgatttggtggagtaggatgttgtagcattcaagtgcttataattgtcagaattgttataatgtgcgtgttttatatgttacacaaatttggtaaagtgatgatgcgttgcttgcataattagatggtaatcaaagtttatgcaaaatgctatagatttggtgtaaacttttcctagttacatttgtaatgggccatgacttatcccttacaaactttcttgtagctgcatgcacattttccatgttataagcagtttgaatgaaagtacttgcatttattttctttattcttgcaacttttgataatgattggctgtgatgcgaagatgctgggttgtttgtctcacttaaaaccttttttccctgttctccagctattgttggtgatatcaccccttcagatggcgtgccgaaggaagaaaagagccgcagagagcaagaagcattggaccatatgtgcagtttgctcggtggtggtccgagaggtaattatcctacatgcaaaagcaacatattaacattctttgccatgggagttaaatctgcttcgatcctgtcaaaataatatttgtttatcttttactaccatatactccctccgtcccaaaatataataacttttagacctcagaatttgtcccaaaatgtaacaacttacccaccaacattctcttcccaaccaatcacaaccctccaccattcacttttcccacctacctccggctccactactcatccaatcacaacccttcaccatccacttctacctactttcttaataaccgtattcaactctaaaacttcttatattatgggatggagagagtatttatttaaagtaactgtgatgctagcgtaaattgctgaaaacttcctggtgaccgtaaacaatattcttagcatgccagcaagatgatccaactgttcaacttaatgccttattccccactatgcttgaaagtccaacgagaagacctgagagaacaattacgatattgtttagatgctaaaaatattggttccagctgaaatccattgttagccttgaattaatactcatcatccttctagtgatgttcccttgacaaccagatcatatcatcaaggaattacttattgctgacatcaggaaaatagttcaggacctagagatcccctaaacaggttgtgttctcacactttggaacataacgtaaaagtcctttaggaagcactttgaaacaaaaaaaaagactaccatttggagaaattgttcttcttgcaggaagcaagatagataaaatactgttgtgtaaaggacagactgaagaatatacaaacagtgttgttctttgtcctacaatatttgatatacagtaaacatatgcctattctctgtgtcattttattcagctgaagaaatccgtgaactttggatggaatatgagcagaatgccactttggaagcaaaggttgtgaaagattttgacaaggtacagttttttttgtccagctatgtaattatttatcttgctacccacaacgattggaggggattgaggtgtggaattaatcccttcctcaacatgattaaccgaacaacgattggaggggattgaggtgtggaattaatcccttcctcaacatgattaaccgaacaagtcctaagtgttagagattttgtctaataagtaattagtatggatgtgggagtttgtaccctgtccctaacgtgcccccacgggggtcgccaacccctgtataagtgtatatcagtatatcaatgctcctgcacttgcactatcaactgctagtctaatgaggcatgatgtctgcactcatcatttagaagataagaagttatgtaaggaaataaaaatactggcatgattggcatcatttgttccaggctattagatgtcagaagtgccatagttaaaaagtattgttaacattaggtgagcactatagacaattgagtaaccctcaagagacttgagatttggatcactgttttccttaacttataattagttgtttttcttctttctattcaggttgagatgattcttcaagcattggagtatgaaaagggtaagctcttattttgctagtttaatattttgatgtatccagaatcatccttttcctttttgaattagctatgaactatacagatatacatttgtcaattattcttgtcgatatgcaaggatcaaggaaagttagatcaaatgtggaatatcttttgcattattgtttcacaaagcactgacaaactctaaatagtgtacaaattgataggcactcagaacatcttgactatattaatggagtttacagtatcagtaatgcttatgtatctgaaattttgcagagcaagggctggacctagaagagtttttccagtcaacagcaggtaagatattcttgggatttccctccatcaaattatgttctgttgtttgcatgagcattcggtatactcaattgaaatctgcgcaatggccttaactgttcaatacatcacaacatgcttgcaccagagtggttattgttgacataagttttgttttctcatgaatttctatattcttctgggggtttttttctccttgcacttgttcttaattttccaacatatctttatagcaaccatttgactaatgacctaacatttattttggttaattgctttgcagggaaatttcagacagacgttggaaaagcatgggcagcagaggtagcatcaagaagaaagtgaaattaaccaatcacatgacatttgacaggccccctttggtgtttcttttccaaagataacctcaaggtttctgttaaacttcacccttaaagactttgttagctctgggccatttggacccgatgcttagagcttgagaattgagatcagctggtttcagaggctagttgtttttttttgcttaagctgggttcttgtagctcacctgcctgcctccgggatgctgattcactaggaaagccttattggccgtcctcgttgttgtgatgtaaaatcaactaattcagtttttatgccaatcgagtttcctcgtctcaattgttgctatttgaatcgttgttttagataaggacgaactgtggtcgctaactaaatatatccccttatactgttaaacctttcattagccagcatacttttgtcatgtcaattcatgtttttgtcttaggctctgtttggaagtgattttggtagtggtaactttcttatttttcattagcacgcttttcaaactgctaaataatgtattccctatgaaagtttctaccgtatgtatttcccattttacacgtcgctaatatatcaagcctaactgagccagtctctctctccaattatttcggtagtatgcactaagacaagcgcatcgatgaagattgggaccaaataagctggaaatgatttcatctcttttctctatatcaacatatggaaataatttcgccagatttcaagatatatatagccatgtcgtttttttgttgaaatccatagccgtttcatttttgttggcagtagaaaaaatggcataaatttcatcttgtaaagtggggagaaaacgaaactgatggtaccgtacgtacattaacaattgaacctatttttatgaatagattggcctacgtatgtttttctttaatcttatatagggtgtgttttagttcggggaaaagaaaatatttgggtgtcacatcggatgtttgaccggatattagaaggggtttttggacatgaatgaaaaaaactaatttcataattcgcttggaaaccgtgagacgaatttattaagcctaattattttgttattagcaaatgtgggttactgtaacatttatggctaatcatgaactaattatgctcaaaagattcgtctcgcgatttttcatataaactgtataattagtttttttatctatatttaatgtttcatgcatacatatgtccaaagattcgatgtgatctttttgggtaaatttttttaggaactaaacaaaaccatactctatctatcccaactataaaaaatctagggtcggatggaacatttctcatagtacgagaaaatgtctcatctggttctatattttaataatgtggaatggagggagtatgtttttctttaaatctcctcgtgtatcaccctactaattaatgcaaaattaattctgcaatgtctaatcatgatagtcacagtcatacaaagatggatttggatcgacctgttggggtttaatttatcggcataatagtgattcttacggttacgccaccacctcattcgatttatttcattctagagatgtcggtattaccctaattaactcattctcgatcaaagtagtaatagtaagatgttagttaggatcgacctaattaattaacccacacattaattaattacttcatttgaggcttgaaccaaaatcatccaactttaattgaccaactagcaatttttaacaattttatatgagcatgtgtatgggtaaagcatactattattcactctaataaataatgtcatgtcagctctaatactccaaaagagtgggtcgtaatctgtaatgtgacacgtttgatagtgttggccaaaagctataacgaataaagtacagtgtcccctcactgcagtcgctgttgacaattgtatttcgtgtctttgtttgtagaattgataattcaaagctaagaaaaatatctgcttttgtgcatctaatttgatttagacatggggaagcatgtgatttgatggtgctcgacttcaaccagcggggtttaaattttggtgtccacgaatattaagcacgtacaagtgagttttcagcaggattttaataatatcagggaaatgtcattggttagtttatcccataataagtacttctaggatagattccactcctaagtcctaaattagctcagctagttaggtttcctgtggtggaaccaacctacccacattcaagttctaaatttgttcttgtggccacattttcaagtcctaaatttgatagggtgctcgtatttactgctaattagtctttcaatggtagacagagtattcgtcaacagtgagccgtccgtggtaacttcattaatctcaagatgtacctgacaagtcttatagagatgctcatagagataggagttgcgtgcgtatgttcataaggataagtgtgtgcgtgctgtgagcgtctacctttgtattgtgtttctaaaaaaagtttccacttgattaaacccaccatatacagattatcatatgattatcatattgtgtgagatctgaactcctttagcatctcttgctagttggcaagagacaaacatcttacaaatgtatcatcttcctctatatatatatataggggaaggaaaaaaagacaataaaaaatggctgccagttgtctagctagcttgtacgggtatgcatggccacgagcaacggtgcaaacggtagctgcagtagtacacacagcatacggagtaggtgacaattactccctccagttttttttaaatgaagttggctagttcaaatttatactagccaacgtcatataagccttccagcgaaattaattagctgcagctagctacaagccgatcggagtagttgcgacaaaatggccaccagcgatgatatggctgcagctcatcatctccggcgccacctcccgtggaggcatgtcaacggtggtggcggcggtcggtctcttaaggaagcccttgcacaaccccgtccagaatcgacggtctggctcactggcctctaccgtccgccgcgcctcctcgcctatgccactctgcaaccaagaaaatcaaattaatataaagagaaggaaatatctatagtatatatggtactccatccatttcatattataggccggttcactttgatgccattttcaaccttaccaaattttggtaaagttacaaaaaaaagtggctacatttagtttgctaccaaattttgctaattacataagaaatcctgccaaaattttggcaagctaccattttggcaatgccaaaatttggtaaggtttttttttggcatcaaagtgaacagtccctataagtcgtttaacattttcctttatcaagcatctttaagtttatttttggtgaaacacaatacaacacatacgctcacccctcctataaacatacacacttcccctatgagcactcttttaagtttgatcaagtttatagctaaatataataatatttttttcattacaaaacaaaacattatatcaaaatatactcaatgttaaatttaattaaactagtctggtgtcgtagacattactattttttctataaagttggtcaaacttaaagaactttgattaagaaaaaaattaaatgacttataatataaaaagagagggagtacaatgttatgtcaagtaagattctatatatatccctatagggatttggtacatgagttgtacgtgtcggtccaaaagctatatgctcgttaggtgtaatgtatgtgttgttatatgttgcacaccagtgctctataaagaggccttaattaaaagtacgttttggttatatgattcttttttggtttagagcctcatttaatttcgcatatatttttttcatatcaaggtctcaaatgtttagagatggtgattaattttgcactgatgctgcttaccgtgatggtgttgttattgacaagacggtcgatgaggttgaggaggatgtcactggtgtactccgggtggccctggatgcccaacacattgtcgccgacggcgaacatctccaccggcgtcttgtcggagtaggccaacaccctgcccattggaggcacctccaaaacctaattcaattaagtaattaagcacacatcaacttacattttcaggtcaatcgattgattaattatatattaaggtacaaacatatcttttgttaggtattgcatatctaaatatttcttttgaaaatactagacacttgttttgttacttggccaggaagagaaagtgatcacagggagaaataataatagtacgcatatgattagtatgcagtgctatgccatgcattaacccagaagtacacattttcagtgtcaaggttttttttttttgagaatattttcagtgtcaagttgagaggtaggagtggtgctcaaatcagcactccaaaaattaagtcaaacaccgcccaatctagccaagtgtccgcaattaaggttttaaaacatgtgcaaatggctatagaataatgcaaacacgaaatatacgatatgatattatcaaactgtgtaataattattatattattaaaatatagcgtaaaagggccatcacagtcgctcttactggttacaagaattatcatattataatatgggaagaaagtggagattgtctagactacaacaattaatgtagttgatctaaatcaatgtagatgatgagaagtagaattttgtttttatataataaatatctaacagccatgtaggagaaaaaaaactattactttcatatcatttcaagatttattccaatattcgttctatggaaacttttaaaaaatatgataagtgtgctctcacctcatcttggtgaacctcgatgatggaggcactttggggaatttccttgagatccccaaataacttggacccctcaaaatcacgcacaaaggtcatcttcttcaccccaatgttccatccacttcgtgccttgccaattctaccacccaatgctcgacacaatacctaattaaccacacacaagaaaaaaaacttaattctcaatatttattaatattttcatgaagattaaccttcaaatgcccagttcattccaaaatattagcatttctacatctgcataagttgtttgtttgcgctgtctttcatatattctccaagaatatgaaaattggaataattataacacactaatttgtgtacaatttattgatatatatgaaaatgataactacctccgtctcaaaaagttttagagttgaacacgggtattaaaacagctggtgaaatttggttgggaagagaaggcgaatataaattttgaatggtggaaagtttcgattggttaaagaaaacaaatgtaggcggataagttattatattttaaaacaaattttaaaggctaaaagttgtttttttttattttgaatgtgaggagtatatgttggtagattaacctggtggccgaagcagatgccgaggatgcgcttgcccatggcgtggagcgcccggaggagggagcagaggcggaggatccaccgctcgtcgccgtacgcgtcgtgcgggctgccgctcaccacgaacccctcgtaccgccccacctcctccgccgccgggaactcgccgtcgatcacccggaagcagtcccacctctcctcctcccctccgccgccgccgccgccgagcgccgagacgaagacgttgccgtacccgccgtacaccttcctcgcgtactccgagtcgttcagcgccagcagcagcgcgtacctcctcccccctacgccgccgctcgccgccgccgccgccaccgtcatcgcgaggagatcgagtgcgtttgcgccggcgaggtagcaggactaagctgtgtgtagtacgttgccggcggcgagctctagctagctgtagtgtgaaattgccggcgagaatgcatggtgtataaggagctcggcggcgacgcgtcgcggtcgggtgtgtggaacacgtgatggggttgccgcgcattattaaactccgccgaaatggggatccatccgtgttacactgttctgcagcatgcgcgtgataaagttttagttagcagaacaagcgtgtatatatagacgcgtgcatgtatgtgtggaattaactgtggattcggcttatataatttgttattcgttgttgagctggctggcatttcgattgaactgggtcttagttttttttatttatgttgttttctttacggatgactggacatgttataggcaattgctaatgctgatggattgaatattgtaacactaattgtttgtataagaaagtcttttttttccgagaaattgtagtaataataatccataagctcatataggctgaaagaatacaacgttagggttcaaagtctagcacacctgaaggcttaaattgaattgagatttcaagctttgtaaacataggttgacgagaatagcaggagtcagtgattattatatacacagtatatgaagagtacgtacgtcttgggagaggtgtccatatataggatagaaggcaacatgataatgacatatatgtgaataacaatttttgaggagatcatgtgaaatatgagataatacggttgtaggtgttgcacggatgttaaatatgaaaaagaagacacatactcttagtttttgagatatatgatttatatagcttttaaaatgatcttaccctttttcatagcttttggaatatacatactgatctttgctagaaaataagttcatgagttgaaaataatgcatccttagtgtttaatttaagtcagacacacccagaggcttaagttgaattgagatttgaagttttgtagtgagtggtttttcttgaaataggttgatgagaacaacaggagtcgagtaattactatactatggtacatggttaatttaaagtgataggaggttaagggactattatagatctatatgcatacagtacagtgtatgaagaggtccggcatgggatatgcccactggatggaaggcaatatgataatgacatatatatgcagatgataatttaaggagatcaggtgaaatatgagatggatgtacggttgtagttgttgcacgaatgttaaatatgaaaaagaagtcatactcttagtctttggagagatgtgagttatagcttttaaaacgaacttggaatagacgtactgatcttcgctagaaaataagaacatatataagctgaaaaaaacattcttattttgtgttatttctcatgagttcccaattcccgcgcgcgcacgcttttcaaactgctaaacggtacgttaatgtttacgtaggaaagttgctttaaaaaaatcatattaatctatttttaaaatttttatagctaatacataattaatcatacgttaatttatcgctccgttttgtgtgcggagaggagggattaccacaacccagttggtggtgtctttacacataggttggtgataatatcatgagtcaaataaatgatgattagatgtctagtcacatgttttatgccataagaggttaaggaactgctccatccgtccaaaaaaaaagccaacctagaaagggatgtgacccctactagtataacgaatctggataaaaggctgtccagattcattatactaggaggtgttatgttttgaatagcacgctcagtacattaagaggattggtatcggaggtaaatataggacggaatacaacatgataatgacatactccctccgtccaaaaaaaaccaacctagtactggatgtgatatatgttagtactacgaatctagacatatctctgtccagattcattatactagaatatgtcacatccagttctagattcgtttttttcagaactgagagagtatgcgaatgacaattgagactaccaggtgaaatatggtatagatgtacgaatgtagctgttgcacgaatgttaaattactagttgctccgtttcatattataagactttctagcattgcccgcattcatatagatgttaatgaatctagacatatatatgaatctagacacatatatatgtctagattcattaacacctatataaatgtgggcaatattagaaagttttataatataaaacggaggaagtacatagttttgacggctgcattatatgtttactatatatatatgcttggtagaggggctataattttataatgaaaaagcaatgttgtgcccagatcaaaagtaactaaagaagatacatttagaaaaaaaaacacaaaggtaaacacgtttgctttgcttgcttgccttcttatttaatcattgtggctcgattaggaccttgctgagatccataacagtggtgtgtaacagtctacctgttgatggacgtgtccatgcattatcgggtctcaatcgcctgctgaatcacatgacattgtctgaataataaacaattaaacaaataatgagataatcagtaactaatttgaacatagacaatgtcgatcttttcgtttttttttcttttgaaacaacccgtataaaatagtgagatgtttttattgataaagcaataataaaatataagtctatagtcctataagtgtaaaactatagtcaggagaaaagaaaatacaactatgccacgtgtctacatttgattctaatgatagaaacataacatgtattctaaacaacgcctccaagaaaaaaaaaaagacgctaagagggtcgtcgtcgcctgttctatagagccagattagatatgctggagttaattttgagcacgagataaacgggtgccacgtttctctacctaaccggaattaacaatacggttttaccatttggaccgagcctttttttagtactccctccatcccaaaaaaagtcaaattctagagatgaatctagacacatatgtgtacacactggtggagaaaccctttgtagtcccggtttgtaacccctttagtcctggtttccaaaccgggagtaccaatccgggactaaagataggatctttagtcccgggtgaaataaccgggactaaagatcgatctttagtcccggttggtgttaccaaccggaactaaagatcgagctgaccttttttttttgcatggccctgttgctgcatatataaaccatgcatatatatgcatatatatatatatatatgaccaaaatatatttacattatagaaaatgtgtacacatgcatatagaaacatatgtagtcatgtattaattacaatccattatatgtcctagctagctacgatttcgacgtagtagtagtactcgctgctagctcagaagctaaggatcggtgaattgtgtttccgtcgtagtagaattcacccttgggatcaaggatttcttcgttgatgaatcccatgagttggtcttgaaccgccgcgataaattccttgtgtgtggtcaggttatccctcatgcgaataaactatatgaatgtatgaaattgattagtaattaaacaagaaatcgttacgtaatgaaattttgaatttatttgtacgtacatcgagctctcttgtggtgatgatttggtctgcaaggcagtggcaatactcacacacgtaatagccgcacaagttagttccctgcttttgctttgcgcactacaaataaatgacaaacaacgagagatataattaatatacacttgtatgtatttgaatcggagaaatataaatgtagagcatgtgtactcacaggaaatttgaatttccgcctaagtctttctctccatttgccgcggatcaaatgacggaaccgataccaagccctacatggagtttaaagctatgattcgtagtagcaattaacataacaagattttcttaattaatagaggaacttatgacggtacctgtctataagttcgaaaaccttatcaaacgtagactcttttttatccattgagtcatatacgttgacggtgcaggccgacaggtcgaagagtaaaagcacccagtggaatctgcaatgtgcgtgggatgcattacatatgaaacactaagcaagttcgtacgggaatgaaatttggtatgtagaaagacagtaaaattaaactaactctgtgttgtacggcaacagtatgaacgtcttgtaatgctgcgccttcaggagatggacgagattgtcctctgtttcttgtggatattggtcgagcattgcgacgtttactctccgagggtcgatgaatccagtatcgaaaaccctccgccgtcgggccctttgaatctccattctacaatgataaaagggagtatattattttctatagtctacttatatacaaggacctaattaattaaaggagacgtatagtaagaaatctaactgaacgatatacttacaaaatccagcaactcataatagagacgtcgagggcgtccagctggtatagttcgtagattcccttgaaattgatccaaagaatgtcatctccttgcaagaagtccgtgtccctgatcctcgctccgatcatctctctaccggtggcgctcatctccatgtacagctgatggaacttgtacatttgtgtgggtagggactgcagcagctcaggcttgacaagcggtttaccgagttcgtacatgtatttcacttccgccttttcgattggtgcgactcctagcaattgatccgtagttagaccggtatcaataataaattgttctatcgtcatttctttaccggtcaccaacggctctatctcctggtttggttgctctccaagctgagggactggtttggactttctagaagatgctttcttcagcgttcgctcatagtccgatagcttgatggcctccttgacagatgcagacatacccctgaagaagttcctaacactggggtctataggaatcttcttttctggacttcgaggcttgaattgtctcttgacttctgatgcaacgtaagtgtcaagctcctcttgcgtgcaatcgtacgccgggtccttgttcttggcggcgtcaactttcgccttcttcgttgcccttgtgtgggcaggcggtggagctggggggcccttgactttgaaggtgctggaagaggagcttgcggaggagtaggtgtaggagcccgaggaggagtcggtgcaggatcctgaggaggagtcggtgctggagcctgaggtggagatggtgctggcggagcatgaggaggagacggtgcaggatcctgaggaggagatggcggagccggaggatatggtacacgagacgccgcttgtcgcccagggaggatgatgtaccgcctgcgccatagaataatggcatggcttgtgtctcgtagatgcgtctcaccgtctcctccagggtaatccagctcgaggtcctcgtacgcgccttcgaccaactcaacttcgaccttcgagtatcctgctggaatcggcctgcagtggtaagtacctgaagggtccgttgggatggccatgcccgacgccaccttcatgttatgagagattatttattagtaatcaacatatataagcagcaactagcggaatggctaaatctaaaatatataaactacgagtttacctttattgataagttcttgtaaggaatatgcagctcacatggtgtccgctgagtgatgtcatcaacaggacaggtcgattcgtcctgtgtttgcatggcgtccatgctctgtgatcctacttgccccgttgaggcgcagctgctacagtttcctgacgggctcaccattgcaggaggaatggtcggctggggatcatgggaccgatgtgcggccatgcgttcatcaaccttccttgccacctcctcttgcatgctgagttcgtagctcaatacccggaactctagatctgcaatcttcgcctcggtatctctcttactcctcatccgactcctgtacgtgtggatgtcctccttgaaaccaatcttccaaggaatcacccatttccctcgtgttcgtcctggatgctctggagtctacagggcgagtgtcagctcgtccctatctctgtccggtcagaacgtgccctgagatgaggcttccactgcatctgttagtcgtcgcgcagcctctcgtatctgatcgccgaagaccagtgagccatcagctgggttgagcgttccaccgtgagcataataccagaacttcgatcgttccgaccaattggcggttgccggttcgaaacccctctcaatcaagctagcctccatctcctcccacttcggcttcgcgacgctatagcctcctgaccccaagtggtgatggtacttcttcttggcggcattttctttgtttctttccatcatcgcctgcccttgttcacctgtcttatatgcaatgaactcgtcccagtgatcccttagctttgggaatgtgtcgaagttcggtgtctgccccttcaggatatatttcttgtacaactctcccttgaagctctgaaactgttctgccattttcttcagagtccaccttttcactttgtcctctgtacctgcgggaagggtgaatgtctcgagcattgtggtccacagcatctctttctccgaatctgggacagagctctcatgatctccgcgtgcccttgttcttcgccagtacaccgtactaacaggcacgttatcccgcacaacccaaccgctgtgacgtacatagttcttggcggcttcggccggggcactaggacgtccatcttcttccacttccgttatgatgtgccgaccctcaagcttcttcgctgcacctcgttgcccgtgtgccctcttctgtccaacggagggttgactaccactagcctcctcctcctggttcccctccacatcactttccacgtgcccctgctggttcccctccgcatccctctccacgttcccttcctcgttcaagtactggtttggatccccattcccctcttctttattccagtactggctgcttccctccgcgattgtatcatacaatatctgttcctcatcgtggtcagccatctgttgatacaagaaacatctgctaagtcacgagacatttatgttttaacaatctaagtcatgtatgctaagtgtaaatgtcgtacattagaaccctacacaaccttacgtgctaagtctaattacaaatcatgacataagctaagtctaggtgacgtatattatacaaccctagctagtaaataattatatactaagtctaattacaaataaaataatcttatattaaagctcaaataatattacatgctaagactaaaatagtcatgtatatgctaagtgtttcgtgcgtatatgctaagtctaattaagactacaatagtcaattgctaggagtcgcaccaattccgtagtcaataattgcatactaattctaattacaaataaagtaatcttatattaaaactcaaataatattacatgctaagactgaaagagtcatgtatgctaagtgtaactgtcgtatatgctaagtctaattaagactaaaattgtcaattgctaggagtcgcaccaattccgtagtaaataattatatactaagtctaattacaaataaaataatcttatattaaaactcaaataatattacatgctaagactaaaatagtcatgtatatgctaagtgtttcgtgcgtatatgctaagtctaattaagactacaatagtcaattgctaggagttgcaccaattccgtagtcaataattacatactaattctaattacaaataaagtaatcttatattaaaactcaaataatattacatgctaagactaaaatagtcatgtatgctaagtgtttcgtgcatatatgctaagtctaattaagactataatagtcaattgctaggagtcgcaccaattccgtagtcaataattacatactaagtctaatttgcaataaaataatcttatattaaaactcaaataatattagaacactacacattcttatatgctaagtctaattacaagtctaatattcttaattgcattacaaatataacaatcatttatattattacgtcatttgcctgcacgaattccttctagggctagctcttccactccggcttgaggaacgactccgacaacacgtcttttctgcaagatacaaaaaaatatgtattaggataaatgcgaagtaacatatatatatattgcatttcacgttcacgttcgttcgctcgttctcattcacattcgttctcgttcacgttcgttgtcgttctcgttcacgttaattcgttcgatcgttctcgttctcgctctcgttcgttcgatcgttctcgttctcgttcacgttctcgcggcaacgtacgttgacgtgttcgttcttgttcacgtgttcgttaacggcggtgtggcggcatcgggccgacgcttggcacagcggcgtggcggcggcggcgttgcgcggcggcgaaggcggcggcgtggcgtgccggcggcggcgtggcgcggcgtcgtcgtggcgcggcgtcgtcgtggcgcggcgtctcgtggcgagcggcgtgacggagagagagatcgagatcggagatcgatgaaggagaggcggcagcggctctcaccccagagatgcggcggcggcggaggaggcggaggcggcggcgaggacgacgagctcgagacgacggcgagatacggcggcgtcggcgcggggatttaccctaggcagtggcggcgaaggagagaggccgagagagatcgatcggccaaaaacattaagtgttggtggagaagacgagggcgcgcatcggggaacaaccgggactaaagaaaagatctttactcccggttgttctcaacaaccgggactaaagatatctttagtcctggttgttctcatcaaccgggagtaaagatcttttcccgctatttccaaattctttttaaacccggttagggttaagaaccgggactaaagattatagcactgcatattattttcgcttacatatgtgtttctaaaatagaagttaatgcattaacattatttaaagtacaaagattaatgacaattacttcgaaaaattatttttgtctgtaataaattaagtggataaatcttaataagaaaatatatgacttaaaattaataaaaattccaataatcatatatacttagcatctgaatgatattattaaattggtaaaaactctaattaagatatgtatgtacatactgcatgatttaaaatgaataaaaattgtaatcatcatatatacttagtgtaggaattatattaaattaaatgttaaaaactctaattaacatatgtaaatgccacatgcatgatttaaaccttttaaaaattcgaatagtcatatataagtagcatatgaaagatagtaaattaaattgtgaaaaactctaattaacatctgtaaatgccacatgaatgatttaatacttttaaaaattctctagtcaattataattagcatatgaatgatagtcaattaaatgtagcatatgaatgatagtaaattttgccatacatcaattgatttatatggataatcaatacatccaaaatagtttacatcgtgtacacaataattacggcattacatcggcggtgacggttgaccgcacgtactttctcctcactattgttccctccttgtgatcgctgcgtgagtaaggtgtgtcttcatttgataggaggatgctagggtcaatcgtcaccgtgaaaaggggttgcccatccaactgatcataatcctcgtcagtcttgtcctcaactccgacgatttttcttttgcctgggagaaccacttgacgcttaggctcgtcaggccctctgcccttctttcctttgctagacatgtccttcacgaaaaggacttgcgttacatcattggcaaggacaaaaggttcgtccgagtatccaaccttgttaaggtcaacaattgtcataccactgtcatcaatcattacgcctccaccagtcaacctaacccattggcaccggaacagaggaaccttgagaggaccatagtcaagttcccatatatcctcgatggcaccgtaatacgtggcagttgttccatcgtgtcccatggcatcgacacgaacaacgctgttttggttcgtgctcttcatgtcttgggctctcgtgtagaatgtgtacccattgatctcatatccctggaatgtcgcgatcgacccagacggtcccctcgccaggaagacaagttgttggttgatcgactcgttacccatgagatgttgtcgtagccacgtggggaaagtatcaatgtgatgctgtgtaatccatgcatcggacttaccgatgttcctggcgcgaactagagccaagtgctcctcgatgtaaggagctaccaatgaagagtgttgcagaacaatgaaatgggctttacggaataaattgttgtctaccgtcattattgctttccttccgagagttccctttccccgtagtctcccttcatggcgtgattcaggtaccccgattgggcgaaggtcttcgataaattctacgcaaaattcgatgaccttctctgttccataacccttggcgatgcttgcctctggacgagcacggttacgaacatacttcttcagaacgcccatgtacctctcgaaaggaaacatgttgtgtaggtacacaggcctgagaatacggatctctttcacaaggtgacaaagcagatgcgtcattatattgaaaaatgaaggtggaaatatcaactcaaaactgacgagacattgcaccacttcattctgaagggcttctaatctatccggatcgatgaccttctgcgaaattgcgttcatgaatgcacatagctttgttattgttgcccggacattgtctggaaggataccccttattacaactggtagcagttgtgtcatcaacacgtgacagtcatgagactttaggtttgtgaacttcttctccttcgtgcttattattcgcttgatattcgtggagtatccagacggtacctttatgctctccaagcattcaaacatactttccttctctgccttgctaagagtgtagctggctggactcaagtaatggcttcctttctcctttggttccgggtgaaggtcgccgcgttgttccatatgcttcagatcattacgtgcttccagtgtatctttcgactttccgtatacacctaggaagccaagaaggtttacgcaaaggttcttagtgaggtgcatcacgtcgattgcgtagcgtacgtccaagaattcccaatatggtaactcccaaaatatagagttctttttccacatcgccgcgtgaccatcttcgctctctataagctggcttccaggcccctttccgaacactactttaagatctttaaccatagcaaacattgttttcccgctgcgatgtttaggcttcgtacggtggtcggccttatgttcgaagtgcttgcctttcttccgtaccaggtggtttgctgcaaggaatcgacgatgacccatgtatacaaccttcctacagtgcttaagatacgtactttctgtttcatccatacagtgagtgcaagccttgtaccccttgttggactgtccggataggttgctaagtgcaggccaatcgttgatggttacgaacagcagcgctcgtaggttaaactcctcctgtttgtcctcgtcccacacggggacaccttccttcttccacaactgtttaagatcttcgatcagtggtcttaggtacacatcgttgtcgttaccaggttgcttggggccttgaataataatcggcatcattatgtacttcctctttatgcatagctaggggggaggttgtagatacacatcgtaacgggccaagtgctatggccgctgctcatctctccaaaaggattcatgccatccgtactcaaaccaaaccgtatgtttcgtgcgtcctttccaaattctttaaattttctgtcgatgtttcgccactgcgaaccatcggcggggtgtctcagcatcccgtcctgttgacgctcttcagcgtgccatcgcaacattctagcattccccttgttcctgaacaaacgccttagccgtgctatcatagggaaataccacatcatcttagcaggaattctcttctttgttagctgcccgtcaacttctcctggatcgtctcgtctaatcttgtatcgtagtgctttgcaaacagggcatgcttctaggttctcatactcctcaccgcgatataggatacaatcgttcggacatgcgtgaatcttatgaacttccagtcctaacgggcagactatcttcttagcctcgtacgttgtctcgggcaatttgtttcccccgagaagaatgttcttgacgagtttcaataaatcgccaaatgccttgtcactaaccccattttttgccttccattgcaagaactccagagtggtatccaatttttgtgcccctgctcgcaacctgggtacaacgaagttctgtggtcctccaacatcttgtccaatttatgggcctccttttcactttcgcagtcctccatagcgtcctgcaacatctgaccaagatcatccgcaacgtcgttaccatcagcagctatttcctcctcacccgtttgattttcttcaaatccaacatactgagcaaagtccggaatattgtcgtcttccacttcatcttcttccatttcaacaccttgctctccgtgggatgtccaacaattatagcttggtatgaaccccgactcaaacaagtggaaatgaatagtcctggatgcagaatactccttctgattcttacacttattgcatggacaacaaataaaacccctttgcctgttagcttcggccactctcaaaaaatagtgcacgccgtcaataaactctttggaccgccggtcagcgtacatccattgccgatccatctacatgagtcaaaaaaaaaccgtacacaaataattattcttacaataatgacagtcatacaataattataagatatctttattcatacaaaaatcataaaatattacaccaaataattcttaaaaactatttgtaaagttttaaactaattttaatgtgttttacttcttttaatttttattttagtttgttttctattatttaagattaactttcactagagttttccttctcaactattttataataccttgtttagcaaatgaactaaatttctatatattctttcttccccacacacattttctctctcatcaacttacaacttataaattttggagacaaaaaaagtgtgcaaaacataggtgcaaatgtagtatgacaaaaaaaacattggaggatgaagttgcaaaccttttaggcacctccgatttgtatgtaatcaccaaaataaattcaatagaaattttggcatgacctcccctcttttttgaagaaattttgaagcttgctcgggcagctggaggaggaagaagacatataaataggggtgggactttagtcccggttggtagcgccaaccggagctaaagatcaccaggatctttagccccggttggtaataccagccggggctaaagttacgatctttagtcccggttggtaactaaagatcccgggggggcctgacatgccctgacagcattcgaaccgggactaaagatgatctttaatcccggttggtaccaaccgggactaaagatcaaatatgcccgttacccttttgaaccgggactaaagatcatctttagtcccggtttttattgcatccgggactattgtggaaatcggccgaccgacgaaagatggtttctccaccagtgacagattcatctctagaattggactttttttgtgtgtccagatttatctgtagaattagacttttttttttacggagggagtactccggtaagcacaaggccgaatttttctcatttttaattttaatttttttaatatttatagaaatattataccatccaaaatatttacacaaatggcccctgtcgtccaagtagagggcgtcaaggtgtacgcattttgcacttaggtcccttgccgtcctctacaagggctgcaagggggtaaatgcaatttttgtcctgccaaaaaatgcattttttctttttttttttcaacttgtccgtccctcacgtcacttctgtaaatgtttatatttacgccggtacaatatttctataaatattaaaaaataaaaatttaaaatgaaaaaataccgcacagggcccatccacaaactcagatgggccggcccgtcaaccatccgcgtggcccacttaattgagagagagagagagagagagagagagagagatcgtcttcaatcgcgtggcacctcaacaccgccacgcgcctcctcctcccctcccctccactccgcgagccgccacctcctccgccgccgacgacgacgacgacgccgcatccccaaccctagccgccgctcggcggtgctgcgacgtaggagcgggtctcctctctgcatgatccgttagggctaccgagccgatcgaccggcgggcctaaaaccctagccgagagaggctgcgggttgggtgggggtgggggcgtgctcgactctccggcggcgccatgaagctgacggtgaagaccctcaagggcacccagttcgagatccgggtgcagcccaacgacaccgtgagaaattttcccccctacgcccatttcgattttcttttccccgtctcgtgtgtagctttcgttagtggggagatggagaatttttgctagggtttccaccaatgtagatgcgaggtagccattgagtcctgctccgctagggtttcgtttcagcaagtatggctcacctcgttggagggctcgttgtttgctgttatttagttatttattattatatggtaatgtagtggatatgcctggatgatgatagtccctcggagctgtgttcgtgaggatggatggattaagctgcaggcttggagctatcgtctgctttggactcatagttttacagtgtgttcatgatgattcaggcgcagcaatgttagcaagtggttactgtccgaaaggagctatcgtctcctttgaaatattgaatgcatagcattgtactggctgattactggataaaagtaaaacttgtcaggtttcactgggggatgataattccatccaaaaccagtatttgaaaccctgggtgcaacaggggtttagatatttatttcttgtctgctacgtcttctataattatagcaaaaatggctctgctacatatataaccgttccaggatttttctgtttgtacactatggaacagattatggctgtcaagaagatcattgaagagatacaaggaaaggatagctacccatggggccaacagttgctgattcacaatggcaaggttttgaaagatgaaagtacattggaagagaacaaagtcagtgaagttgggtttttagttgtcatgcttagtaaggtaggccgcgtatgtgctgtatataatttaaatggtgatgttatttattacgcttcatttaattcttttctgactggatgctgggtgtaacggtgcagcaaacttagttgttaaggaaaacacgatgacgttccatatactccctccatcccataaaaaacaaacctagtacaagatgtgacacatccttcatattcatactactaggatgtgtcacatcccatagtaggtttgtttttatgggacggagggagttaatagcataaacagttaaacaataacttgcgagacgtaatcattttgtggatattcataaacgatgaatatgcctggctctggcctcatttaatgcatgttggttttctgataatctgacatgggcgaataaggaacatgattaatagtcctttccacgtagcagctatactatgggtagtttcttctatgccacagtaccaaacttaattgacacctgaatcgttcttatgcttctttctatgattaattttcatgacctgtcaacagtcgcttctctatctactggctttacagttaccattatctataatcacattatccgacatttcctctcatgcttgtactcttcttgtgttgctttggaagacatgattatttacttaatctctgattctctgcagagtaaagcttctggttccagtggagctttaagttcactggtaatactattactttttagatgtatatgcaaatgtttttttttttcatttactgactgcatgatccgttattagacttcaagcacccctttgaccaggcaagaaactcctgcggatgcttcacgagcagctcctcaacccctgtgagtgcactattgactttcttttttgcatcttccccattcatataaggtattactcactaggtggatgtattgtgctcttgcagagttgcacctacaagaacaccccagcccgaaaggccacctgcggagtatgtttccagtctgcaatcaatatttgtgctatgtccttttttgccactaatatccttgtttcgtgacgtggtcactccgaaggaaaattcctttctttaaatttgatagcacactcaaatcattcaacatttcatacattaccacatctgataaggttccattgtgaagactggcatacacgcatacgtgataagatgaactaataaattgtggtctgcgagagaggaggggaaaaaaacacacttgctagctatcagcaggaagttaggctttagtcctgatcaattttgggattctaatagctatggaagatagatctgaattggtcttatgaatatgggttccactgtttactttctaatgaaatatactttatatgcttgctaaaacttatttttattttagagccccttcaaacgcatatggtcaagcagcatcaaatctattgtcgggaagcaatcttgacactacgattaaccagctgatggaaatgggtggtggcagttgggacagagataaagtccaaagagctctacgtgcagcttataacaacccagagcgtgctgttgaatatctatattctgtatgttctgtttcctcctgtaaatgtttgttattcttttttttctaacgttaatagataatgtttgtttctcccaaacattagggcattccaattacagcggaggttgctgttccagcaggtggtcaaggggcaaacacaaccgagccatcttctactagggaagccagtctgtctggaattccaaacgcatccccgttaaatcttttcccacaggtttatatgctatcttggttattcattaccatcgcctactattgcatgtatttaacaattgaaatttagcagggcgatgcaaatgatggaggtggtgctggtggtggaacacttgagttccttagacataaccaacaggttgtcatcctctctgttttgccatataagattatttttgttttttgttcagtataattttcctgagcaaatatttggttttttaatatagtgtttcttgaatatataaattatgttgccattgtttgtctggtaccggataactaccttttagcttttcatagccagcaatggagccactgtatgcatgataagatgcttttgatgctgctagcattgtttctgatttattattgttattttgatagcataccctgtcatcttttgtgcttgaacagcgcaccaccctgtatggtgtgagcatcaacttagtgaaacttccatatcatgttttccttttttgagacaggacctaatgttcacatcattttggtaccctcatgcgtattcgagaaaaaaaagcatcattttggtatacctccattcagtataacgttgcgttgtttgaattgttgaagtataacaccgctatcttcactattttgcagtttcaggcgcttcgggaaatggttcatactaacccacaaatattgcaggtcatttatcttgtttgacatgtttacatgctatggattatcttgtatagcctgctatggcttattttgtatcacctgcctaatctttgtgctggtatcatgttatagcctatgctccaggaactgagcaagaagaatcctcaacttctgaggttgattcaggagaaccatgatgagttccttcagttaataaatgagccctttgatggtgctgatgggtatgaactgttcatctgcttgattcaattctggtttcatttgatttgttatagggttataggattcgttaatgcgaaatgaaaaaaaaatcaattataaacttgaaatgccattggtatgttctctgtgttgcttcagcacactcccataacttctttcaatggattttcctcggtgctacttgtacaatatggttacacctttttatggactttctgtggtagtacgtgtgcattactccggtattcatttgcactcgcctgcttcctgatgatacagggacttcttagaccaacctgaccaggatgagatgccccattctatcaatgtcacacctgaagagcaagaggcgattggacgggtatgtacaacatagttaactcacttattacctcttgttacagaagtatatacagtgtacataacattacataacaacaatgttttgaattattttcatgcttcagcttgaaggcatgggatttgacagagcacgtgtcatcgaagcattcttcgcctgtgacaggaacgagcaactcgcagcaaattaccttcttgaacatgctgctgatgaagattagatggaattatttaaacccggtgagaactcttgccatgtcctggccgactgtttccctgtctttggttcagtaggaaaccatgcactaacgattatgttttatttgtgggggccatgacagcttattctgtacacctgccctgcaatttatcagacttttgaagtttgcgggtgctttggatccaaattgaacaagctgagatggagctaacaccgcgttgcatcgatttatctcttgtacaatacttgctttatttaattgctggcttagcattcaaatacatggcttaacatttattcgagctgtctgagggacggatccttttgtccatccgtttttagccagaaatttcaatggatgtgaattgtgttgaccacattttctgtcctgtttgtgttattcaattcgtgatttctagagcagtaaatatagtgtgcagaaaacattgcgattgtcgagaacagagctccgttgcattattagccccttctcaaggcgagaatgggacaattgctcttacaaaatcgctactcaattcaaaataggccaggactcctttggaatgttggaaatttacaggattattacggacattagtttaaatcctataaaattcttgtgaatttccaccaatccaaatgaggttccctcacatctccgatacatcatctcatagtgtgcagcatagcttggagtcgatggatgccaggcaaatgcacaatgcctggtagccagtcaatgggtacctacaacaaacgatgcttatgctaatgaatctttgctctttgactgataaaaaaattcagaattacaccctgctatgatgaagattattgctttctttttttaacttacctgaagtccataatgtacttggatttgccaatcctaccaagctgcaatattgtctgccttcctttctcctgccaaacaaagcaaaattactcacagtttgttccgttgtgatagccatgagattccaatcagatccaacaattagagttcaggagtgtggcaacagcataaggttgctctgtttacctccaaagtcatctggaagttcttcaccgatggctgcaccttgtatcccatcctccctgccctctctctgaagtccagttcataccgttttgtcatctgtgaacgatgaatgcagcaggacaaacatcttgctatcagcttactctgaatcttggcatagtatcaatcaaataacaagagtcattttaaaatcttaagagagaaattgcatacattgttgtagaaaggagatcttgagcagagctgatcagccttgatcttcttctcttgccaatcctttggaagcccactgatgtgctgaatctgaaaaaaaaattgaacattccaaaaaccacattcttagcctaatgaattattccactgaatttccaacctccacaacaggaaattcacttgcctgagctgaattgctgttcttcagatgaatggattggttcttgggaatccaagccctcatgcttctgaagctccctgtaagcgtagtaacagtaggcgcaaacctgcacaaaaccaaaacctgacaaattcaacaaaaatcactcaaaaaccttcacaattcctgcatgaaatgaccccaaacggatatcgaatctcacgcgacgacgccgaggagccgcttcgactggctcttgatctcatccaccctgttcccctgcatttgcaaccatggacagttgaacacccacatcaatggcggctcatctccaattctccatcaaactatcaccatgaggaaggagagagagagagagagagagagagagagagagagagagagagagagagagagagagaggaggttgtggtttgttgtacctggccccagattcggtatctggatccgacgaggtttgagctcaatgtgccgaggaagttcttgtcggaggtgcagaagatgccgtccagattctgcgccaccacgaactccgacctccctctcctcctccggtgccgcgccaccgccagcttcctgtcctgccgcccctgcccctcctgcgccgccgccgccgattagactcgctcaagcaagcaagcaaccagagaggaagatttggatgaaggatggaagaggctcacgttggtgtagagggagtagagcgcgacgccacgggcgcctgcggcggcggcggcgagagtctccttggcgatgatgcaggtgcacctgccgacgtcgagggggagagggcggcagaggagggcgcggttggggagcgtcgcccatgacgaggccggcgccgcctcgttgtcggagaggtcccacgcctcgtacgacgacgacgtcggcagcggcagcggcggcggcggtggcggcggtggaagtagcagctccctccccctcggccccatcctcacctgcaaccccgccaccaacgccaccgccggagacgacccctcctcctcctcctccctctccttctcctcctcggccttcatgcgaacctgcagcgacgacggcttcagcggcggcgccggcggcaccaccaccgccaccaccacaggcggcttcttctcccctccatccttcccccgcccaatctcggtgggcacctcgttctccttctccttctccttcgccgccgcagccgcagccgcgccgccgcgagcccgtctctcgaccgtgccagcgttggagctgatggggcggaggggctcccgcttcgtggccgccatgggaggcgaggcgcgagagctcgcgagttctgtgtgtgtgagagagagaggttgtgtgtttgtcttattcaaattgtgggggttgggtttgtgatttgtggtggtgatttggagggaggatttaaatttgaaacgcgagaggggggtgggtttgggtttgaaacgtggtaacggtcgccgtcttggttgggggttggactttttggggtggattgatttgattcctttttggagcttttcttccttggattttgccatttcggtgacacaagtacaaacctcatgtactgtgtgcccccctcatttgaatggaacacgcggacgtcatcatcagaatccagatcatttaaacattatacaaaaaatgttgaaattcaattttttttcaaatgtgcttggttggatacatcctgatgtactccatactactatctccgtcccaaaatatagcaacttttgactattaatctggacacactagctaaaaaatacttatattttaggacagagggagtagattggattgatttctattttatactatcaaaaagttgtttcaaaatctagaggtatattaattcatctatttcaaatttgctcatttaaaagctgactctgcaaaaaattattactcctacctatttttttcccgcaaaagaaaaccatggcatgcttaaattggacgagcagcagcagcgaacagtacaataaatgaatgaactgataaaaaaaaaggataagatgaacagcggggccgtaacgttgacgcattccatccatccgtaataaagctgcggttccaataaattcccaaacatgtgagccgcttttgtttaatgcgcaagtacgaagcaaactgcaaacgccagctttggaagcagcaatcatcagggtgctcgaattttgcggatgcagtgcaacttgttaaaaaaaacgccacccaaatttaaacgcggggatggattgggtgggtggtttggtttggcctccgcgcgccgccgccggcggcggtgggtgggtgccccttctccggcggcggcgatcgtcggcgtgcggcggcgacggagcggcggaggtgtgcatggtgatcggggtctgctccatccaatctccactctatggagacgagggctggttttcccagctccatccactctttttttcacccgcatgctttctaaatgttcacagttattttagaaaagttgtttagaaaatcacagtaatctattttttttagaaatattagttaatacttagttaatcatgtgctaataaattgttccgttttacgtgtgtagaagagttcctaacttgttgtcttgttgagaagaacacagccacacgggagtacattctccgtccctaagagcaggtacaatagcgggctataagttaactatacacatattttaaggagataaataagaagagagaagggcagcgggctacacatttgtagccagctgtagcacagactccaagacacattgtacgtatgacatatgggaccagctattaatagtgtagtatgtaactattgtatgaatgagctattagattggctatagatgaattggagctagtagttggctatactattaaacttgctctaaatataagggattttgtttggatgtgacacatcctaatacaacgaatcttgacaggcttacacatcctagtacaacgaatctgtatagagaaatatgtcatatccaaccaaaatcccttgacggagggagtactaatttgttggtaggttgggctcatatgttaaaaatgtggacccggcccactaataaattggccatgcgttggcaccagatgggcccacatggcagaaatggacctagccaatatatactttttgggccatcgcggaaaaagcgaaactgtctctcatattattaccggcgtttttccattcatttttggccgctttatcaaatcgttgccatggactatttgctccatgtcttaaacataagctctcttttttttaagataatggaataatcatctcggcctttactcaacaaagctaagtataagctctcttagaaacaacttttgcaccgtattcatttcgttaaacaattaatttatttttataattaagtaggtaatctgcattaataattaatttggtgaatgatatgtttcaaacgggccatgtctagggttttctttgaaaaaaaaaactctcgaactgttctgcgcaaatgaaatcaccgtgccatttgagcatttgacaaaaaaaaacaagattaattagtttgagataacgaagctgacgagatcaatctttcacgaatcctcctcctcttccttccgccaagtaagcatgtatagtagtagcgtctctcaccgtctcttccaagcgtgcaagccacccaccctgacgaaaccagaaaattcacttgttattactccatttacggggacattcacttttaagatgtgtcaattaattatttgccactcgctgtttataacatatgggtcctcatatgtctatgacatgtaggtctagtggcaaatcatttatcaccatccgtaagagtgataaataattaattattctccatttggtaaactacacggttggtggtacgagagaaagtagtgtgataaactacacggttggtggttggcccaacggccctaaccttttgaaacgatgtaccggtcctgttcgtctcagataatttaacagcaaattggcagtctaaacaataacaaaaacagttaaatttttatcataccagttttacgaacaagttgcgaggaaggtatcctttgtaaaaaggaaaaacgtagggcatagttcatacccgggttgaacgtgcgtgactaaaatctgaagtacacaatcacacacttgtattacttggcattcagtgagctatgttgaaaaaaaaaaccaaagatgttatattttgaattatcaggaaacgaagtgacatcgcgcacctccaagcatgtacacatcctccgttaaaaaaaacaacaacaacacttctaagtttaagtttaaggtatgtttgttttagtttaagattattgtaatctagattattgagtcatattaccataaaatgaattataataagttgacatagtgttagccgtttgtttctctggattattagctggttgttaggtgttagccacacaataattaaaaaaacagattactagattatagtaatctggcttttagatcgtaataacatatcataataagctttctgtttgtttcagcttacttctaataattcagattgtaataatgctaagctgaaacaaataggaactaaatctgaacataagtgattttttatgaagtgatcactatgagtaggcatttatcatgagaactattttaagatgtggttttcttaattttcataaaagaacatacacgtggacgtcttgcactgtacaatgtatatggccatcacaatttaagcatgcatcactcgaaaacaaatcatgcgtaatcatgcttatcaataggaacacacgttgtatctcaaagacgcaagcaagtaacccatgtttaatggaattatctctcgcacatatccatccagatgtgttgcttttttttttcttccacttaccaaatgtgcacccgcatgttagcatgtatcaccaaacatcatatctatcccagttcacaattgtatcaaacactttaagccaaacaaacccctcttcaacatcaatttgatttaaccaatctacgccctgtttttgttttctctaacaaaaattggataagcttttagatactcgtgacacgtttttcaaactgttaaacggtgtgtttcatacgaaaactttctatataaaagttgttttaaaatataagattaatccatttttaagtctgtaacgattaaaactcaattaatcacacgttattatcacctcgttttacgtgaaacacttaatttttatcttcatctttatcatcaggagattcaaacatcttagtacgtatcagcgctctttccaagtattgccattccacacaggaaaatataggttgtgtttagatccaaagtttggatccaaactttggtcattttccatcacatcaacctgtcatacacataactttttagtcacatcatctccaatttcaaccaaaatccaaactttgcgctgaactaaacacagccataagctcaaaagcacaaagcaccgctcacaaagaaaaaaaaaatatcgtaacgattatcctagaccatctgatccacaatccgacggctgagctgtcaggtgcttctccgcaagaagaaaatagaaagagaacatttaagaaatgtcattgataaaaacccaaatccgagaaatactattgacgagtacaggtttcataaaaataccatcgtacaagtgatttttgtcccagaaatacaatcgccgttatgattttatccattccgtgtcattaaatgcaccgttcattctaacggaaccctaacggagatagcatttttaagaacaaaaacacttgtataatgcaatttcatagaactctacttacgccgtgtttagttccaaaataattcttcaaacttctaacttctctatcacatcaaaacttttctacacacacaaaattttaacttttccatcatatcgtttcaattttaatcaaacttctaattttggtgtgaactaaacacagccttatcgataatatttcttgtaattggatcgattacatttgttgaattttctcagataaaaaataggctgtgcaagtgcaacggaacaggtgaagagttgcccacccatcccatccctcccatgtgccctgccgcccgctcgtgttcgtccgcgtcctcgtcctcgcctcgtcgcccgtgtcgcccgcgcgcccgcccgcgcgcgcgctccccgccaagatttcgccacgccacgccaccacctccgcctccgcctataacctcgccgcacgcgtgacgggagcgcatcgcccccttcccttcccttccctccccatccaggcacgcaggcgcgcgcgagagagagcgatgggagcggtggtggccgcggcagcggcggagatgaggcgcactggccgctgcggcggcggcggaggcgggggcggggagaagaagggggcgaaggaggagggggtggtggttgcggcggaggcggccgccgagagggggcggcggctgcggctggtggggtacgacgagctcccggacttcctgcgcgacaacgagttcatccgcggctactaccgcgccgagtggcccctccgcgacgccgccctcagcgccttctcctggcacaacgagaccctcaacgtctggacgtgcgcgcccccaatccccctcccaattccattcaatctctccttctcatcatctcatcggtggatgatttgcttttcaattttcatgccgattgtttgttgtgcatgccatgcagccatctcggtgggttcctgctcttcctggcgctcgcgctcgccggagccgccggcgacgccgccgccgacgtcgcgccggggatcatcaggtaaatacattgcatccacacacatcacatcccacccacgtcacagtcttattcaaaaatgtttttcccaatttctattcctttcttgttccacaatttaaaatgcaatcctcttcgctgttctaattcatttttaatcttacaaatagaaaaaaataaccgcgtgatttccgggtgccagtaggtatctttgaaaaggtctatctagtgtgtatactatttgctttgatgctttcatgtttgggacttttgctgtggtgccctctagattatgtgtatttactactttttaccccaaaatattcaaatatggagtatatttgctttggttacttgattacttctgcgaatgaataagctcctaccactgactgatttgttgccgcttagtttcctatattgttcttgttttcacatgctttcgcaattttgctattgtattatttatatattggtttttttaacgattattctgtaaattagttctatgctattaataaccatgtcgaaatcaaaacgacaaactttcgcatacggacaatcacgcaaagtttgccacacccctttttttgggagcaagttcttggtggtatcactagagctatagaggaccacctagagtagggattaccaaccactcccaaacaatttctgttcgtgttcgtgcacatgtttgctgtcgtaaatgtaatactattaacatttacagaagggtcaaatgcattcttacatgcataccactgcaaaattaccattcacactggagatatggagtagcatacagcagattgaaaatttgtggtgacaagatagattatgaattgttggtgtgcaagtgtatcatagtagtcaggaaaagatagatgctggcatgctgcccatgtgatgctaatctggataagctgaataattcactgtccaagattgtgagaatcgcacaaacaaggtccgagaataaggtcaggacgtgtactcctagctggggtacattatcgtctcattctctatacctttcttgtcggcaatgaaggaaatagtactccactataatacaatatggaattatggagtatctctttggaaatgcaatggctttggttgtgcaaattctaagtttgttggggggttttcagtaagaacatgggatgctcattagttcttcatgtaattaaatccttttcttcgtcatgagctctccagaaaatgaagggttttttttttcctgtttacgcaaaggccctttaattctgtgtcatccttatcttttctttgcaggtttgtggtaggatcaaccaatgcttcttggcagactaacgatcattcggtaagaaacgaatcgaagaatatatgaatatgtcctgttttcgtattactttcggcgatactagttattttcatgactcatcatattacttttcggagatgctgaaacaaacatccactctctagaagaaataacaatcattaattatttaattgtttactcctcagcagattatatcccttgtcacagctcgcaatctttgctactctgcacatatctgaagaaaactgcagttatttatgcaccattattgttggaactttactgcatagaattttgtttgacactaggtaacgaacgacatagtttggcaatatgggacgggtttcattgctcattcagataggtgcactatgccgtaccgccattagtaaagcttgattaagctaacgaattaatctagccgggtcccaccatccattgcaagtgagaaagggacatgaacggccgtgatgagctgcagccaacctagggtcttagctagggaacacacacatatgtcatccttgtccttgcattctgcaagctgcaaggagaggacatgttcatcagctttggtgtcttggagatgcctctgctgctttccatgtatcactggtacaattgtccaggcatctatccacacttccacagggatgatgatgattgctgatgaatcggcatctatccacacttacactttggagtagtagtacagtacttggcaggccagttctgaattcggttttgagttctctttggacctcattggattattggaaacacgagaatatatcccagatttctgtagaagtttaacagaaactcctgcgaaaaatttagtaatgttccaaaggagacctagcaaaagcagccagattctaacaaaaaaactgtacactgcaatcacaagcagcaaggtgtttttggtgccatgtgagacagttcaccttgtgatggagacactcctctcttcttggaaacaaatgtagcgtttggcttttgctttgctggtcccttctttttatcattggcaaattaagatttgctagatagtttgcagcattttcacgaatgctcctgaaatgatacaatgaacgaagtgacacctgccatgagcactagcttttgtcagccatctggcccagatcaatgagcagacaagaccaagtggcaaatctttgtatctatcctgccgttgatttctgtgatgaccaatgactcaatccgtctatgaatcttcaacaatttcttcttcttcttctttattttgagaaattacgatgaaattcaaaagaaacttgaaaattgtgctcactatttttaagtggcactatgcttgcatatgagttggtgtgtttgcacttagcatcatggtagtatgcagttgttacagtgatgtgaatgaaggtggcattggatgcagggcgcggcgagccatgacgccgcggcggcggcagcggcggcggcggtgctgggcggcgggcacggcgtgccgcggtggccgcggatggtgttcctggtgggcgccatgacgtgcctggcgatcagcgcgacggcgcacctgctggcgtgccactccaggcgcgccagcgtggtgttctggcagctcgactacgccggcatctccgccatgatcgtcgcctccttcgtcccgccggtgtactacgccttcctgtgccaccgcccggcgcgcgtcgcctacctctccgccatctcggcgctgggcgcgctcgtcgtcggcgcgctgctctcgccgccctgctcgtcgccgcggttccggcgtctccgcgccgcgctgttcctcgccatggggctctccggcgtcgtcccggcgctgcacgcgctgtggctcaactggggccacgccgcctgctacctggcgctctcgctcgaggtcgccatggggctcgcctacgccgccggcgcctggttctacgtcagccgcgtgccggagaagtggcgcccgggcgtcttcgacgtcgtcggccacagccaccagatcttccacgtgctcgtgctcgtcggggccgtcacgcactacgtcgccgtcgacgtgctgctcaactggcgggagacggtggccgccgcgtgcagcgcgacgtcgtaggcgactctcctctcctaggcattttgctcattgcgttttgatgattcaaacaatattcaaatttagaagaatggagcagtgttagatgagattcaggatcagggtgtgtgaccttgtgtcattcgatcgatcgaacatctatatgtgatgaattgaggacgatgaagaaattgatttacagtacaaaaaaggtcgtgcctccaaatcccggtgaactttggaagttttggtttccttcaatttggaagttctggtttccttttcgtttattaatgcgagatctgaatttaaggggttgtcacgcatgaattttaaatgaattttgtattaactagttcaattttcacaaaattcatatgaaattcgtccgttccaaaggaggccagaacgacggcgatgactgatatgaggacgatttgtggtatgcaccgaattttccgatcctttatttagagaagatttgctagtttttacaaaacttccccaaactttacaaaaagatgaagaacacgagacggaaagggctgcaggggctgccatcttctcaatcgaagacgacgagcttgtcgtactccgggccggagatggccttttccatgacggcgcgcggggagacgacgccgtcgccgtcgaggaacagcttgaggaggttcttggagaagccgctgaccagcgccacccccttctggccggaggtgaccggcacggccttggagtcccgcaggttccagaacaccacctccggcacggcggcgccgtaccccgccgccgtgtacttgcgcacgatcgcctcgtagtccgtctcccacggctgcgccgacgcctggtcgaactccatgtcgctgaacaccaccacgcggcgcaccatcttgtccggcgagagggcggcgcccgcggccacctcgaggatcttgtcgaacaccgcctggaagttggtgttcatgccccagttcatttcgcggatgaaccgcgccttgtcggagagtgcctcgccgacgatgtggtggagctgtgggctctcgctgaaggtgatcacgcggccgcgccacgggtcgtcgctgaggtcggaaacgaggaggccgagcgcgacgcagacgtccatggggaggccggtcatgctgccggacacgtcgcacacggccacgcagttgcggagcttgccgagggcgcgcatgtcgtcgaccatgcgctgccactggaggtcggccacgccgctgccgccgccgtcgtcgtcgagggagctgatgatctggtgcgggagcagcgcgcccgcggagatcttcttcttgccggacttgacgtcggcgaggtaggcgttgaagcggtcggcgtcgtgcttgaggaagaggtccttgtagttcttcatcgccacggaggcgacgcgcgtgtacaccaccgactcccacgcgcgcgccgagatgtacacctccgggagcttgagcgcgcggcggagcggcacgagcgccgccttgcggaggcgctcgcgggcgcggtaggcgtaatgcgcgtcggggaggtccgcggcgagctccggcaacgagcccttggggaagaggcgccgcgcgatcgcctcgcagaggagggtggagcggtcgtacgacttgtccagcgacgggcaccacttggcggcgagcgagaactcgtggacgttgccctcggcgagcttgcgcatgtcgtcgcggaggaggtcggcgaagagatcggccgtgcgatcgtgcagggatcggtaggtagggtcgcggctgtacctctccaccgccctcgccgcggcctccgcccgcctgcaccgccgctccaccgccgccttcgccgctagcctcccgtcgcgctccaggctggccgcgatgcgctcctccgccgaaccgacgccgcgcgactgcttcctgctgctggtgtggtagccgcgggcgaaaccgcgtccacggccacggaagcaaccgcggccgcggccacggccacggccacggcgggcgatgaagccgatgccatcagcggcggcgaggcgcgccttcttcccgggcttcctcgtggacaacccaccattgacgatgcggtggaggagctcggggaggtccttgaggtagccgaaggccgcgacggaggcggcgttgagcgcgagggtggcggggtggtggctgtggagccagagcgcggcggcgtagaacccctcgcggtccgacttgccggtgccgcgtacgcccctcaggttggccaccagccggagcgcggtcgccgggtcggcgccccacgcggcggcgagcagcgacgcgacggcggcggagggcgtcccgggcacgacgtggaagaagaagtcgaggcaggcgtcccccgacgacacgaacgtcggcgagaggttctccgtgagcgccttcctcggcgccggcttgttgaagttggcgtccatcaggtcgaggaacgcgtcgcccgtggtcgtcgccggcgcggcggccaccgcagcggaggggcggcgtgcctccggtgggccgaggagggtggcgatggcggtggcggccatggagagagagagagagagagggctgggtttgggctgggtagtggatgggctttggagttgagcccgctgggttgatgtggatgtgttggtggaggaggacgcgtggcttatatagggaggggtttcgtggcagccaaggcggtctaggtcggtagtgctcggcaagttggcatggatgaaatgaaccgacattagcgtatcaagggaaaaaaaaaaggagaaaataaaaaaaaaatgaaccggcataggacgggtgtgtatggatagtaggactcgtgtaccgtggcgggcaaggatcatttcgttttttttttttggttttgtttttctcgtcgtggagcacatgtagcgtgatcgaaagactatgtgttttctactgtagtttgaaacagctgtcgtctttttgtttttctttctagtgactcaagcgtaggggtggacaaaaagctcgggctcgcgagctcggctcgggcttggcttgagctcgcgaagctcggctcggctcgaagactaaacgagccaagcccgagctccctccacagctcgtttccaaaccgagccgagcccgagctagctcgcaagctgctcggtaggcttgtcaagcctatggaaaactgagttccctaagcgagcccaagcccattaacaattgtctggcccatgaaagagagaaaccctaagtcctgagctgagccgagcgcgagccgtgagcacctgacgccccagatccgatccctcccctaatccccttcctccgttcctcagccactagcgcagtggcgctggcggtgactggcaagaggagttgccggccgccgcatccatcccctccccagcgccagaccgccagcggcaggccggcagcgccgttcgaacttcgaagccccctctgtgccgccgccgccggcccgccacctcccttccctgcgcggctgcgccgcgggcgtgccgcctcgctccttgcgccgcctacctcccctactgtggctgcgtcggctccgtcctccctccccggcgacgccccctgtgccgtcggcccaccgcggcgccgcctcccttccctagttccctgcaccacctccggcctccgtccaccgtccccagtgccgctcgagccgagctcgacgccccctgcatcgccggcgtccctgactcgacgccgtccatcatgacctcgccgagacgccatgtcgccaaccgatcgacgacagttcatgcatcacaccgcaacgacgagcctaggatgaagaggttcgtgatgtattttctcatttttgtgatgcatgtacatgtaggcatgtagctgtagattgttgtggtcagtggagtagcgtgtgtgtgtgtgtgtcagtgtcaaactgtcaatgattcaattacagaaagaatgaggcaaataaatcaaaaatgttgtaccaatactatagtttgaggctttgagccatgtgttttgtgtagtatattatatatgagagtgagactgcgagtctgcgactctttgttagttgttatactgcactgcatatacttcacactcttgtttttccattgtttataattttgactcatctttaaatatgttgatagatccaaatccaaatcaattggtgcttcagatggtaacgtcgtcggtgcttctgcattctctactactggtgcctcctcccaagcagttgtagggtctacgacaagtgatatggcatacaaagattgtgatgtaccattatctccaataatagccttggtacagtacttgccctacatgaccttagttctaaaatgaataaatgaattgcatgtcgatatgcattgattaaattctgttttgtttatgaactgtagattgatgacgataattcaaaggataattcttttgatcacattgatgacatgtcaatgtcaatgccaagtggtgatgaggcagcgactggtggtactagtgatgcttctggaggggattcattgggtggacgccgaagaggaaagaagctaaaggtttcacccaaagttgctactgtaaaggggaggaagcggtcaacttgttggaataacttcaccgaggttaaagttacttccaaggtaactccaggggagacagaaacaaaggctaagtgcaagtattgccattcattgtatgcttacaaggctgggggagctactacacatcttgtgaggcacatgaacaagtgcacgccttacttgaaccagttggccaagaagagggctcaagctgttctcaacttcacggcagagaaaggtgactcagatatccctctcattgtcacccctagtgagtataaccatgaggaaactcgtaaactgatagctaagatgataattgttcatgagtacccatttaggatggtagagcatacttggttcaatgtcgtgatgaggtatttaaacccttcatatcagtttattggtagaaagaccataagaagtgaatgcttgaaggtttttcattctgagaaagaaaacctcatgaagagtattaggagtgtggaagtgattagcttaacatgtgatttgtggacatcaaatcaaaacctttgctacatggcgttggttgcccattacatagataaaaattggacaatgcaatgccgagtgctgaactttgcagagttggatcctccacatactgggaatgtcataggtcaggccatctttgattgtctagctgaatggaaaattgaagacaaggttataacaattactcttgacaatgcttccaacaatgatacagctgtcaagggtttaaaagctaagctagcagctagacgatcaagttgttacaatgctaaatacttccatgttcgttgttgtgctcacattattaatttaattgtgaatgatggcttagcacccttggcatctttgacaaagaacataaggtctactgttaagtacatcaagaaatctccatctcgtatacacaagtttttagaaatctgtagaaatcttgcaatggaattgggagagggcctgaaacttgatgtgaccacaagatggagttcaacttatcatatgttgagaacttgcattgcatatcagcaagcattagattcatatgcagaaacagatttaaattatgagtggaagcccagcccagaagagtgggatttgtatgcatcaattgagccaatacttgggtctttggctgaggttactactgcattttcaggatcaacctatcccactgcaaatattttttacccccatattgtcaatgtgaaagttgctttgagagatgcttgtgcttcacaagatgctaatttgaagaatatgggaaaagcgatgttggataaatttgacaagtattggaatgtgaaaaacaatgcaatggtgcttgctactgttctagacccaaggtacaagttaagattcattgaatggtgttttaagaagatttatccaactgattttgaaaaggagttagctgaagttcgaactgaattgaatacactttatgataagtttgagaaggagcatagggaaaagatggcagctagcaaaggtaggagcttgagagcttcatcatcagtttcaacttctgacataaacaagtctctaccctctgtctcaagcaattttcagtcttatttgcaatcttcttctgaagatgcatcaaagtctgagatgcttttatatcttgatgaacgaaatgaggacttagcgaacaaagcttttgatctacttgtgtggtggaagttgaatggctaagaactttttgactataccagccagttcagtgtcatcagaatctacttttagtgctgggggaagagttctaagtgattatcgtagttctctatgcccaacaatggttgaggcgttgatatgtgcttctagctggattagaggcgctccaatgattacggtactcactattatgccatgcatatttaatgcatattctcttcttaacacatgacatgagtagctgaattaacttttgatttttctgaatttcaggcagcagaagaagaagaggatgttgagagtattacatttcctcaaagtgtagtgcaaagcaactagtaagtaaatggagtacttcactcattttttttcctatttctttactatcatttgctcgcttgtgattacatgatgatttatcatttatgtaggcaaatggatggctcatggctggaacatgttgctgtggagtgtggagaaagtctaggagttggagatttggagagttccttttaatattttgcgaaataataattagatgttctataattattttgtgaatttgagaatggagactttggacttttggaatgtggtctactctaagttatgtactctctataagactataactatattactctatgcttctattatggtgtggtcatgactattaagattatgtgtgtcatgttgggacatgtcctgtgagtgtgaggctgtgaatgaatgatggagattgtggaattgtggtcttgtgaagttgtgatcttgtcagcttgtgaaatgtataatatgttgttgctgtcttgttgatcgtacatgttgatttggcttgctaattgattgctctattgttgaagtatttacttgctgctgtacatcacaagctggctcgagccggctcgagctttgaaacgagccgagccgagctgcactttttgctcgttcaattaatcaagccgagccaagccgagcctgtagttgagcaagctttcacgagccgagccgagcttggctcggcttggctcgtttccacccctactcaagcgttgcagatctggagactggacttcatcattctttccgagaaggcgagaacgggatgactttgagaattcgtgcacttaatttctgagtaacatggtgattttttttaaaaaaaaattacacatataacttttatataatatttcctccgtttcagaatataagatttttctatcattactcatattcatatactccctccgttttacagtttaagtcattctagtattttccacattcatattgatgttaatgaatctagacacatatatctatttagattcattaatatcaatatgaatgtgggaaatgctagaatgacttacattgtgaaatgaaggaagtatattatgtctagattcattaacatatatatgaatataggcaatgctagaaagtcttataacctgatgaaacggaggtagtacgtattaattgattttttttttcaattcgttcgttccctcgaatcattcggctattcaacatagcattttgttccattcaacatttcgaacaatagaacaatgcacaatggattttacttgaaaataccggtattattgtaggtggaggagcagtggatacgtaacatcatccagtaggttcaatcttgatgtctactactctgttctaaaaaaagccaatcttggctatgaacctggacaaacatgtgtctagattcgttggtaggattaggtttttatgggacggagggggtattaatgaagtgtgtgttagaggacgctttcacggctacacgagtgtggtaggtttctatgagtatacggttggcagttgtgccattgacatgtgggttatagtaaagtagagttcacatgttagtgatacatgtgcaaactgcacaaagtcagatggtttgtttacgagcgtgacatactccctccaaaaaaacaataacttttggttatgaatctatagatataattagattttttttttatggaacggagggtgtatatgtgtcctccatctaaggaaaaaagaaaaggtttattttgacttataagagttaatcacatgatattgcctcagctgccattttctatcgtgcccgagaggattagatggccaaagtggtcccggtcaaaattagatggccaaattggcgggtatttacataagttgttcttgcagaaacaattgttcgcacatactagcattgttaaatacacttaccaggggcctagtagtatatatgttaaaatttactaaactagggggctattcactttgatatctaaatcaacattaccaaaatttgtataaggttgaaaagtgtaagcttgtttagtttgttctctttgtcaagtttttgtgagagattctagaattaccaaactttgataatggagacaaattttggtaatctttagattacttaccttgccaaaaaaattttagtaaacccaaaacttggtttgatttattttgggaacgaagtgaacagcccctagatttcacaacgaaaaatgccagggagaaatcaacagatcaatcatatggtccaacagcagcacagcaatggaacatatgctcaacatcaaaccaagcaagtgcactaacaaaagcaagacaatgatatgaaagaatattcagtctgcttgaacgaagatgataacatcagtggtagctgagagtctatttacaaaggaacctgatcatcatcattatgtacaaaggatgaagaagccacaagcaaccaaggaagtctataaatttcagtttcagtatatttacagttgagagtttctcccttcatttcagcagccataggcatgatcaggaaggcgttttcaacgaatattgtcaggtatcatcgcgaccgtcaccaggaagtactcacatcccacaggcagattgtacgggttcagcatggaagcgggcgaccggcggccaccgctatcaaggcgtgaagcttccatctggtcaccgtgcgagggcagctttgctatgcgccgttcgatgtgcacaatctgcccgattatgtaagctgggtgccgtggatgctgctccgtgaatagggccactgattcctctgataggtagtagtttgagcagttccggttgattgcttcgtaatgcccagcagggttccgaacaaagaccgcgagctcatgaacttcgaaacggccgaatgatatcttctccttactagcctgttgaacagtattgacaaccgaggatactgtcttgttatttcaatcaacaaaatttaacagactcaacctaacccatagagtaatatgtgcttattattgattagcgcggaatttaaactaaaacaatttcaaagtaattggcttcttatgaattcatttattttaataaaaacagtggcttaagaagttacgactcgtacctgtttttccagttgaagcttactgtacaaatttttaatcgactctttcttctcctccaacactcttacaatccttgagtagcgttctagcagctcagcactctgtcgtgatagaaaaccaactttgtctgccaggatcttgatgcattgctgaaactgaatggttgtatcaccttcatccttctttgcactgtttcaataaaaaagtattactcagccagtaaatctgctgtttcgataactctacagcagtaggggatccaaaggaagaaaatgctaatacttttataaagtaacagaactctatgcaaaggaaactactctgagcaaaaagaccaaaaacatacaatcatctgaaggaacacaaaattattttgacgaccaatatttcactgtaagcacaaaatacagtttactactccctccgtcccaaaatataagaacatctcccaaaatataagaacagtttactactcactgtagaaagcatgccaaggttaaataacatctaacatcttcctagctctgtttactacaaattatgcaaaaatgtctcgctaaaataacatccagcgcctctctaaatctcaacaatgagccaagatacagaaaatctggacatacttcctggaagctaccatgaattctattctgctgtttattttgtcggtctcactgactgccaactcacaaatcactaataacttggatatgttgaaccaagatacagcaaatcttagaagttccttcgatcctatttttcttgtttattttatcagttccatagacttggcatggatcaagcccaacagcacaacgaacttgggggtgggtggtttgtaaatgaaatgcagaactgactacacatgagtttaagcgaatgagagcagtaagataccttgctaatgagagagctaaagcacgcagtgagtccgcaaaaccagacatgcctggtgcagtgacacagttatttagtctctcaaacagaccatgtatcctcagagcagatgaacgcagggcatcatactcaacagcccttctgtcagctgaacatttgtttgtgcgggcctcttctcttgcctcgtgtaagcagttctccagttgcacacagttcatctatattaaaatttgtaaaagaaagtaagcagcaatttcaattgagcatgaaaaaaaaaactattgctgaatattctacctcccacttgacttacctgagactcatcaagcagaccctgggtgtgttcaagttctttcttcagagagttgacctcatccaccaaggcattaagcttgctttcagtttcatctaacctttttgatttgtcttccagagtactttgcaactctgacacaagcagctctttgtttctcagctctgaggtatgatgctcgttagttctggagtttaagatgccaagaggatcttctataggaaccccagaagtatcagtcgtagtaaactgtgtcaatacttgcccttccttatcagaatcaacaattttatgttcactatcaggtggcaattctgccatgaaagcatccaaattagtgcgtgctattggatcgagcaattgcaagttcagtgcacctgaaatgtcggtcatattctcatccccaccttctgtttgtttagatggctgctcagatgttgaagaggcctcatccatggccacacttgattcatcgcgtacttgggtttgcctccctccagatatgtgcaagttgcagtcattagctttaaatgcagaaaggagggaatcagatgcatctttgcttccagaaatcacgtgcccttgtatgtactggtttgctaattgctcctcaagctcctggatgcgcttctcataggacaaattttgattctgctttgctgtaagcattgcctgcaggtgattagcatactcatcctttgcagaaagtgctgcagctgttttttcccttgcatctttcagtacattatcaatttgcccttcatcaatagattcatatccatattcggcgccaaaactgcagagaactgcaattgcagaagcaagttctgcttttaatctggcattttcaacttccaatttactagttccagcaatatccacactgtcaaaaccccccagaaagtcttggaaatccatcttatcatcagcattcggcggatattgctcggatttactcaaatttccactggtaccagaattgctcaaggaggactttggcagttgtgatctctcagatttcagaaaagacccgaccaaagattggggtgcaagtttttccacatcatcaacatcaattgagagaagattgcaatcaaatggagcaactgttacatcgcactggcttggggaatcaaaaagtcccatggaacccatgatatcttctggaatgtacttactccatgtcctaaagaaggcctctcgccttcttacctcagcttcacgctcagtggctagcttttcagcaagctgccctgccaagccagtataaagcttaaaagaagactttcttcgtacgacctcagcaagacaagccctgtacgcatgacccatgccactggcaagttttaggctatcgaaaattttatcttgatgacccatcacctcttggaatgcatggagttcgttcatcatttccttgataacaatctgagcagatttgaccctttgcatgctaacatgtaccaaggtattcatttcattcttcttggctttgcatttctccagcaactttgtgaacaagcgatcgatattatggacactgggcaagttgtccttttcatgtacttcatagatgcggccaactgcagaaaccgcatcatgagggcggagagatgcagaaagctggcagtttgagcagtcatcaacaagcttttttgaagtagtcacatctttactgcaggacacaagatattccagcttagagtgggatataacatataatcatataagcatcaaaacacttggtcatactgagcacattgcaattagtgtagaaaaccgtagtgcatgaaataattaaacaaatgaagtaagtacgatgacaagctatattccttttgcagacatcaagtaaccacgctgaaagatttcctattccttttgcaaaaccatcaactaaccatgctgaaacatttcctcatcctaagtagtttcatgaagatctacagcacaaaacacgccgcacctatgatccagatcaatcattagtaaaagtagttccgagtggaaggtgacacttaacgtgtagtgacacaatagaagcacaattttccaaatttctcctaagtagtttagtgaagccatagaacaaaggcatagcgtaaattattaaatttagatgattcagggaattcactagtaattattaaatttagatgattcagggaattcactagtaatagtagttcagggagggcatgtaacataacagcaagataactaggtaaaaaacatgttcaaagcctaggtctaaccttagagactgcatgatgattttctggtcaccgatgaatttctcgtgttcctttatcatcgcctcaagatccttgcacccagtcgagctcataatattaaacaaattttcaagcctcttcttcaattccatgaatttggccttgtgctgtgagaccttaacatcaaactgtttatgtgagctgaagcacccatctgccagcttcctcaggtcattctccttaacgaggtcaatcaaggagcgcctcccctcgcattgcagcgccgggtgaagcctcacggcgcgcagcctctccacatccctctcgaaattcgccagcatctcggcatggccacgatgctgctgcgagaagcacttgacgaaatccgaataccgctgcgtgagcttccgggccgtgtgctccaggttgctccgggcggtgtcgagtgcccgctcctgcacctgcccctcccgcagcagccggcagcacacctcgtgcttcgccacgctagactgatacacggcattccccacctggaagtggtatctgaacgtggtctcgtaggacaccagggccttcagcgccgggtcggaggacacatccagcggcggggaatcctgtggccggggcggcggcgggatcgacggctgggggatttcgatcgactccggcgcggggcgcggcgcgccgtcgtggagccgggccttgttgtacaggaacacctcccggtcgtcgcggggcagctggtagtaggcgagatggtgggcgccgtcgagcgaggtgttcccgcagaggaggagctggtcggccggcgggatgccgcagaggccctcgatggtgcgctggattgcctccacgggggtctcgccgccgcacttgaactcgaaggtgtggccgttctccgccacgtgcaccggcagcttctgccccagcgccaccgccgccgcgtcctccgccccgccgccgccgccgcccgtcaccgccgacccggaactcatctcccccccccccgcctcgaaacccgatctttcttcctcctcttccactccccccaacgcagttcagattaaatctgcagtttttctaccataccaccacaatcaaaaccaaccacccaatctcgcaagaacgcgcggcgcgcccacccaagaacacacagctcctcctcctcctccccccttcccttcccccaattcctccccgtctccggttcaccaacccgccacggatttcttctcgatcaccaagaccatccacaagacggaaccggtctccaagacgcaatccgactcctccgccgagagggtcacctcaccgagcgggtcacgcgcgaacaaccgcctcgccgggatccctcctcctcctccttcttcgccgggaagacggattcagcagcgagcgtgcgtggcgttagcaagaaccagcgagaccgaggggtgagagagagaggaggatgaggaagaggaggacgagaaggggaaggaggcaaagtaaataaagggagatgtcgaggggttgaatagaaaagtggactaggcttagcttaccgtgcgggagtagtatacagaattgctgcggggatgtttttgcgaatgggtccttgtagattacagaatttacgttggagttaattattggaggagaggagagtgttgcttccggtggaagggtaagcggcgtagggaatagaataccgtggatttcttcccctccggttttttcacgtgagtgtccaattttctctaaactataattattttcgatgtgactttatgaattttgttgttatattatttatttactatacaaaaaatataaatatcatatcattaccaatgagtttgattctaatatatgaacatgtttgattggttgtattgcgcatgcactgtattgccgccgccacacacaacatgtaacacaactgtagcaataactagcgaacgcgtccaatatattcaagtaaaaaaatagagtgaccaattcaaaataaaattatcaatttacttccatcatcaagtaacaagatagtagttagtttgtgcatgcagaagaagtcatcatgttgtcgcctaaagccttaaactccgcattttttactagtaggctaggagtaagagaaaaaaaaggcaaaaaagccacatgtatattccatataaatcaggctagtccaatgtcaacactatcgtgaaaaccgaagagactttcaccagtaatttatagatgcatgtgtttttaaccatgtttttattactatgttaaactgcgaggcatatgaataggctatgtgaggtagggcaattcaacgagcgtgtaaaaccacaagttagtcaccatgaagctaagatactcatttggctgattaaggctacgttctgctgtgttgctgggataagctactgcctatccactagaaaacgaagaaagtctaatacttaatatgaaacagtttattgagcagattgagtatctacttggcattagaacaaatttaaaataaacttaacatatatcaacataacaagtgacatataaaaatatttatacaaaatattttttcaaagcatagagtaaataaaatatagtataacattattatagccataaggttcgaggcctgatggcccggcccaaggcacgaccatttggcccggtccaagcacggcacgacccgatagttgggtcatgcctaggtcgatgcttcggcacggtgggccgatccagcatggcgcggtcgaagaaaatatagtagagggatcaaattagacttaatcaaccatataaggcaaggccaaaaaaaaatgaggaatacaaaatagattttttccagccaggcagccatgtaagacacagcccaaagagttgagggagtacaaatagacttattctatagagaagcacgatgggctgccgtgccctcgggccggcccgtttttattgggccgtgcctgggccgtgggtgcagcctgtgggctggcaaggcacggtcgggccgtgccggctcgactgacctcgtgccgggccgggagacacctctataattcaccggttggaacacaggtcggtcgggtttagagaggcaacaaaaatcagtaggtcgtcccagggcagggccttgctccgatccccaatccgtccctcgagcgagcagaggcgccgccgtcgctcatcctgctgcttccgccgccaccgccgccgccgcctgcgccgatccccatccatcccgcaagcgagcatcctggttagcacatcctctttcccatctctctcgacccacgcactttttttttttatcgaatttgcgttaaccctagctcctgttctagaaatttgccttaaccttaatactactaataacagtttgtttgttcccaaaaagtttgggggttgaactgaatgaacccccatgtcccatgttagatccgcccatggcatgcagggtggtagagtaataagattttcaagtgcttgctactcatattctgatgatctgttgataattttatgttaggattaggatgagttcgaagaaggttccattccaccgacataaggagaacgaagaggcgaggaagaaggtaagggttttcaaatctctttctggagacacctctacttatacttttttgcacgcacattctatccatatctgattttaactgcttctgatctgtgtagagagagcaagatgaagcggcacgtgtgtacgaggaatttgtggagtcattcaagggtgatagcacatctgggtcgaagtttgtccgaggaggtgtgattgatcccaatgccaagctgaggattgattccgaaggttagtgatatggtttacattttcatataccttgttgtagttggctttactctttgtagattgaaaatcatgatggatatatacattgtttcttctattgctccaattaatcaagagaccggcctttttattcattcggcaatggcaggtggaaagtccaaagatggggggtctgttccaaagaagggcagtaggtaaacgaaaaaaaatacttgatttctagaagagggtatcttgtggtaccgctgcttcatcttagatggccatatggccaatataatcggaatccagaggccaaccacgagcattaaatgattcatgctatattttttcaccattttacttttcgctagcatcatggttttgtgaattgtctgcttatgtatctacaaagttgataccaactattgaatgcgtttgatagacacgagggttgtacaaatttctgcttgacaaaacgcattcaaacgcattcaataattattccagtaagtaaataattttgcttgactaattgcttgtggactgtatggaaaagcacacagatagccatatttccatctagtgaagtgtaaataattttgggatgacttttacttgtctgacatataaggataatgatggctcatgttatatgttttcttaaaagcatttccaaattcatcatacttcgttccttcgggaagaagtttcagttatcagtgaagctgactataacttttagaatcttaaaagaggtcttagaatattatgatttacatgtgctgagcaactggtatatttagtactacatccgtcctgaaatgtagctatttctaccacaccctctcaaccaatcacaaccattctccatttaatttcttcacctactttctcttctcaaccaatcacaaacttccttcaatcatttctacctacttccttaatacccgtgcccacctaaaaaaatgctacgtaacattttggggtggaggaagtagggttgtttttagtaatcctctttctctctctcctctgaaaccattatctaactaactaactaactttatttagttagatttatggagtttttactaattccatattttcatcaacgtttctgctgttatttctccaaaacaagatgatctgaactattttcgtccagaagttgaaaaatgtgcatgcttgtgaaaacctatggcatggcaaggatgaaaggagccttagttttgtaatactccgtatttggattcctcttgtgcaatcatgctagtataagtcagaatttccattaaatcattgcaggcagtcgagtgtaagctttatgattaactgaacgttctatatagtttcttggttaacatgattttagaaagagaatttgtgaaagtatagcaaaggtgaaaagtacagctatttgtcaagaaagctgtagggttattagcaactcaccatgctggccatttgggcacactgcttgattctgttttctttttcatatacccgtgtcatctaggtgtatacatgatagataccttatacgtagcgtacttttatccaggtatgttccatcttttttgccgccgtcatttgggaaagagccggacaaaaaggttagtacaattccaatattcttatggctgtctcagtagtcactatggttttctggttaagcattatcttgctgtgcagaaagaagaggagcgtccaaaggaaaaggaaagacgaaagccacgggtaatagacgagttcatggaggagctcaagtttgagaaagagcttcgacaaaagcgtaatcaggaacgcgagcaatggcgtgagggtcgacacactgacacatctgctgtacgcacttcagtatttgacagaataggcctttatttacttgcactagacagcactccaaaagaacttcggagtgctttagatcatgtttagtttgttggctagcattaatgcccattagttagtaacctatatatgtactataggacccaaaacaaaagagcaaaaatacaactttcctcaaatatgaaaaaaatatacctgatcacatgatatcagttagtaacctatatatggacacctgcaaaaaaacaccccttgtttttaaaacaaagattgcagtgctttcacatatatggccacagaagatcctctggggtagggggaatgaggtgtagaacacaccatcatccccaactcctctttttagaagagtaaagatgatgaaatattcttttttttaattgcctaggttgtagaacgctgtttttttcctgtctgcactctataactgtttttttaatataatacgagtagttaataaagaaaaataatgatttcttgcagttttttctgtagaaatctttgtggcattattaatagtttgctatttattaattgatgcctgttactgtgtcctgcagtcctctagccgttttgatgaactaccagatgaattagatcccattgggaaacttccaggatcatttgatgatggggatccacaaaccacgaacttatatgttgggaatctttctcctaaggttggcattctccaatgcgcttgttttgtttatacataaggttaactttacatcatgattaacttgatggttgcattatattatatgacaggtggacgagaattttcttatgaggacatttggtcgttttggacctattgctagtgtcaagattatgtggcctcgaacagaagaggaacgcagaaggcaaagaaattgtggttttgttgccttcatgaatagggctgatggacaagcagccaaggatgaaatggaaggtaatacattttcatgtagtgcagggatcatttttgtccatttgtacaggagctagcactcttgctttcagtggtcttgttttttataatcttatggttcatctcaggtgttgttgtgtacgactatgaactgaaactagggtggggcaaatctgttgctcttccttcacaagcactgcctgctcctccaccagggcacatggcaatccggaataaggaggtgctttgtttgttcttttgcgttgtgtcaaagtttctatgttgagataaccttttattattggtgctgcctgcatgagttggcattgattaccttactcttatatttatatagggtggtactgtcatcttatctggtcctggtggtccacctcttgcatctgttaaaccacagacctcagagctggtaggggatcttttcttactgcagctgtttattgtcacgaaatgcctttcttttgtgctttactgatttgtaatattggcaaagtgcatctatccttgactccttgttgtctttgtatttttgctttgatgaatctttaatggatgaacttttaacaaatcaagatacactgctttccatttgatttctttttctgaatgttttaagtgcttgagtctagtatagaccaataaaaacatttaccacttcccttgtggtgtacagattactatatggaatatccttccatctttccccactcacatcatttatgtaggcctttccattgtgatagcgatccttgtattctattcaactttgttggttatgttctttatttacatgccagccaccaacagaaggcaccattcgtatttgcactggttgttctaaccaattacaaaaatgagtgctaagtatggtttttttgcaggttatcgaactaatatttgctataaccaaaaaaagaaaaaaagcttaactgatcataagatggagaatacaatcagtttttatcaaatatatttaatgatgttatcatgattagattttaatatctgtgaataaatccctccacagagacaaaagtggatgctaagggacagaacaattgtagtcaaaggaatgataaaaaaagaggtgttagggcctgccttatcacttaaaaaaaatgctaagatactttgcttcaagccttaaatttaactcaagtaggcattgcaagtggttctgtcttggatgaggatatctgcagttagcttgaaattgaatgatatctaataagttttaaccaacattttggttattattctaatttcatttggtttaacaggtcctcacaccaaatgttcctgatatagtggttgctccgccagatgatgcacatgttcggcatgtgattgacacaatggctctgcatgtacttgacgggggatgtgcttttgaacaagctgttatggagagaggccgaggaaattctttatttagtttcttgtttgatcttaaatcaaaggagcacacatactatgtttggaggctatactcatttgctcaggtaaaatacattgatgttgttaaattttcaatctctatatctatgatctactaaagggaagtggtgatagtattttgttggaagtgaactgtgatagtaaagaggtttgtcttaattgctgtcttctgatatcttttatgcaatgcagatttatcattgagtttccactatatatgttttggaatacaaaaatctaatagcaaaaatgaaaattcttttagtttgaataaatttatttatctttgtcacttatcggagttcttgttagaatttttttttgttctcctagagttggacttgaaatgatcttcttttgcacctagccacttatcacttgtgttttgcatctatgcattattctgaatgtcaattgttgaagtgataggatggtagcattaactgcatatggtgatattggaatgcagggtgatactttgcagcggtggagaacagaaccatttatcatgattacaggaagtggaaggtaagagagatcacacaattatatttttattccaatatgtattggtcatgcgtccgcccattgaatacgtaatgccatgatattgtattaaatatgatattcatattccagatgggttccacctgctttgccatccagcagaagtcctgagcgtgaaaaagaatctacttttgcggctggtagaagcagggtaagagattgctgcattttgttgaaggccttttgctttgttacggtgaatgtttttgtcctactacaaatacgaattcacattttctcttcagcgtgtcgaagtggagcgcacattgactgattcacagcgtgatgaatttgaggacatgctacgtgcattgacattggagagaagtcagataaaggaggctatgggatttgcattggataatgctgatgcagctggagaggtaaatccttccttgcgctagatttgacttgatcagtcaatttctccctttctttctttatttttaaataaggatgtattatttcattcttgtttaggttgccttcttcttgttctttttttgttttagattttttataaaacaccctttttttggtaaatcacataacatgagagtactcattagtgctttgccttgtatgttcagattgttgaagttcttacagaatctttgacactcaaggagacacccatcccaaccaaggttgctcggcttatgctagtgtctgatattcttcataacagcagcgctccagtgaagaatgcttctgcattccggacaaagtttgaggctgctctacctgatgttatagaaagcttcaatgatttataccgcagtatcactggaaggattactgctgaagctctgaaggtaagttgtattgttctgttttttgagtcctttattttattcctttcttgatgttaccttacgatagcattattttgttgtttctctgcaggagagagttttgaaagttctacaagtatgggcggactggttcttattttccgatgcatatctgaatggactaagagctacctttcttagatcaagccacttaggggtcatcccttttcactctctatgtggtgatacaccagaaattgaaaagaaagctagctctgaggacggcagtgatggatttaggctcaacgaagatggtgccttggccacaggaaaggcagcggcaacaagggagctgttagggcttccgctagctgaacttgaacgccgttgcagacataatggcctctcgctatgtggtggtaaagagatgatggttgccaggttgcttagcttggaagaggctgagaaggaacgagtatatgagaaggacgcgggcattaaatatggacaaggagaatcgcatagaactggaagagatgacattgctgtgaatgctcgtaatgcttctagacctggagaaggtactgatagtggtgaatcagacatgttgggtctctctcattatgctatggaagcagggtacaaacgctctaatgaatccacacccgctgaacctgttccaagcaagaagccaaaagttgaccctgttttgcccgcttcaaaatggagtcgagaggatgatgtcagcgatgatgaagatagaaaaggtggcagaggcttaggattaagctattcatctggtagcgatattgctggtgattctgggaaagctgatgcaacagaagttagtactgatcactcgaatcatcaccaggatacgattcttgatgaagagcataggtaccttttgtcatgatttagcatgcaattcaattacattttttaatcatgtactccgtattagccaattacttcatacagtttataatgtaattgcacatgccttgtgatctgcagaaagaagttaaggcagattgaaattgctgttatgcagtatcgtgaatctcttgaggagaagggtttgcgaaacacagaagagattgagaagaaggttgccagccaccgtaggcgtcttcagtctgaatatggtttatcattttcaaatgatggtgcaaacagcaggcgctcttctggtatgtaagaaggcagcaatgacatatcctctgcttgttggataattgcttttttgttgtttttgaacatacatccttcacttctgaattctgatactagtgaagaatatttttttttttgatatttggctacctttattatctgcgtgatatatcctcatgaaaagcatcacttcctttttttcagagaggacatcgtcggagcggagagataggcatgatgattcttcaagaaagcgtcatcgaagcctgagcaggagccgtagtcctccaaggagatcactggaaagagatcgagagcacaatcgcaacagagacacagacagatctcatggtaatgatgctggacgagagagagacagggtacgtgaaaaaagcgcaagccgagggagggatgatcactatgatagaagcagagacagggagaaggacaggagaaagggaaggtgattgatgcctgcaaaatctcttgcattcatccccttgcctgaataaggtgcagtgtgatatcctgtgccaggttgcatcagttaaaatctgttgcatatatgaagagtatctggcctgccacctgccgcatggcttgaagaacctgtgtattgagtgccctactcatgtagcttgaaaaacagggacagcgtgtgaaaaatagaatattatcaagtggaactgcggaagtagtgcattgaaactctccgccttgtggtggacgaccgcagctaggaactttgctttggtgacaaatgaagtcaagagagttgctttggcgacattgtccatttttattcattgatgaaatcaacgagtgtagttgactaagtaatccttttttttttttacaatttctgctatgctctagtttagttgctatggtagaggtagtatagtgatagtaggggtcaaactgggtatgttttgtcagattgaaggtgcattattctcatcctttgcgtttgtataattgtatcttaccagtctggtcaggttagctatgctgctatttttacctcccttcgaatccagtatacacaaactgaacaaatcgttctctagtacagttgctatgttggtatgcatgtaaatgtatggatgtctgcacatgaatgcttggtgaatcactgatgagcatctgaaatctaccagaagaaaacaagaagagcccaggaatgggaagtaaagagcacgcaactgcaggagataacaaccaaaacatgggggtgatgccccatgctaaactagttaggtcccggatcgaatgagacgtcgcaacaaacaaacccaaaggcttctggcagcgaattcagaggtaacacctttttaaagccgcagcagcccactggtttgatcgtgttagttaaggggaatcttcacttaatctagctatattttcggtgatacataaatcaagaggcaaagcaggttttcatatgtcaagaattaaacaactaatgtcaaagaattaaacaattatacataacaaatagcaacaaattaattagcatatgaaccttgaactgatccgacaccacctttcgccatcgcaaacttctttctagactgaagactcgggctagagatggatatgaattagattaagatgaatgttacacgctgcccgtcagcttcagttttcgttgcttattgtctttgcatggtggcgagattactacttacaaatgttgtcattcgaagagaaaaaaagcgattcctcaacgttcaggtcccacaaggcaatgcgagctatctcagcataaatggatcacaagatgataagatatgcacgagaaaagtcatcagatcatgaatcagcggcacatagattcaggcttgcattcatattgcactactatagtactataaattttcatcctggccaaaatgcttctctcacaccggtttgtacacgagctaaaatgaggaaatctaaggcattagatattttgaatggctttccctatctgctcgccaacccaaatagcatgttattgggtgattgtgccattatattttttttaattacacggcaaatgcacacatatatacaccactacatatgcaaaggcacacttacatcccacgaatgtctcaatacatgttttaacttgatctcacaaaaatccagctgaaatcctatctacatgcccttctgaaagttttgacatctaaaactaagatcaagaatcttccatatattaaatgttgcgtttatgactgacaatatcacactccctccatcccataaaaaacaaacctgttgcacttgtcacactaaaaaacatcccataaaataagtaaatattcatgaaaattggacttacaaattctctaaaattatgaaaaaaataatagagattggtataagcatggaatacatttacaccacggccagtgtctccaagtacactggcatggcatggcatgcagtgcacctagcaaatacactaaaaaagccaaaagaaaaataatataataataataaaccagctgcctttgtgacaacagcccaacccaacccacaaaaatatcccatcccctcacgaaatccatttcatccatttttccgctctctctctctccgaatgcgcgtgatctcgcactcgcagcctcagcatcagctgcatcactccccgcctctccgcgatcgcaagggccgcgccgatcccccccgcaccagaagccctcgagattccgatctcccagaaaacctccgcctcgcagcgcgacggatccatccatctcgccacctttctcccacaaggtataaattcttgtttctttgctcgctctgcttggttttgcggttcttgttgctgtaattctggtggcggctgtgtccttttgttcggtctgggaattcggttttgctgggttggttaatttcttgtgttgtcatttcgcgcgtcattttccattgtgtacagtacagagcagtcgattttgcacggatctcgtacaggtgagtggtttgggggttagttagaggaagttatcttttatatcgagttggatggtgaaagtgaaacctcacccaactcaggtggtggtctaaggggaagaaaaaaagatatctttgttggtataggtatagccccttgattcgttttgaatcgtgtgttttgaattccgagttagtctcattttattctcctgttacatttttgatttaggacaaataccgatgttcaattatggatgttggttggccaaacttgtcctagtttattcctgattctgtgcaattataaccttttttatttttttttgggggttgtgtcctgtgattgctgaagtatgatgcaataattgagtttttttttttgttatcacaaaggcttgaaatgtgccaaagagaagtggatgttgagacttgagactgtatccttctgtgtcctacatggtagtagtacagacacttgtgtgatgtctgttaggtttttgtttctgtttttctccatcctgttacatcagcattggtgctttgcatacctggtacatagcaatttgggcgattgcgctcttgattgtttggtttatattgttggttttgccattattgatgtcttgttggctcatcgctgttttggactcattgtacatttgttcttcttttggttctcaattcgataatggtttgccatcttgattttttttttaggaatttactagctctcggagaaactacggttgaggcttgcggtttggatgcaccttcatgtttataagaaggctcagagctacctgatataactcctgttctgtcataaacaggtgtgcttacttgtgtatgtgccatttgagtactcaactgttttctggtttctgattgctctgttaattcaatttcgtagtgatatgcctgtttctttcctcatgagttcatcttcttatgtgcagcttatcaacatgggaatctacctcagtacccccaaaaccgataagttctctgaagacggggaaaatgataagcttaaacttggtctttcgtctatgcaaggatggcgtgcaaacatggaagatgctgtgagtttaccactagaacgctaacatcattgtcagtttgggcaatacctcatttgcttaacgaaacctttataacattttgaaaatatggatatccaacttcgtatcatgattatagtttgttgctaaaaaataaatcatagttctaggtttgctgcagtctaattttcttatcatagtttcagtcattatgcataagctctcttttaccaacctgtccatatttttcaaatttagtttgcaaattaattattttcgcaataatagtagagttgatttttactgtgctggtccattagcccagtggtacagagctggttatacatagctacagcagtaaagcatgaattcttcataataatttaaaatactgcaatattgttcatttcaaataatcatagtttgctgaaatcccctctcatggagtgcttgatgttttgcaaattactgcagcattcagcattgctaaatcttgacaatgagacatcgttctttggtgtttttgatggccatggaggtacgcagtagttgcaaatatcatctgcatgtttgctcatagtactcgtgtgagctatcctatgttttatagatccatactttcaatgttgcacatattatcctcatattccttgtttccctcaggaagagtggttgccaaattctgtgcaaaatatttacactctcaagttctcagaagtgaagcctattcagctggtgacttaggcactgctgttcatagagctttcttcaggtatatgggtcattagattaccataatagataatatgaggattagaatcttacttttaattattgccaacatgaagataataatgattaattctgttgatgtactacttcaggatggacgaaatgatgcgaggacagagaggctggagagaactatctgcacttggagataagataaacaagattggtggtatgattgaagggttgatttggtctccgagaggcagtgattcgaataatggacaagatgattggtctttcgaagaggtatttatgcaacacaagtgcatcaacaaacttatctccccaaaacaagctactatctcacatcatattccattatcagggaccccactccgattttgctgggccaacatgcggatgcacagcatgtgtagcgctaataagaaataaccaacttgttgtggcgaacgctggtgattcccgttgtgttatttctagggctggccaggtctgttaaaagttttcatcattttagttatgtttacttgtgaacgtatgtatggcagtctgagtgacttttctttaagtgtgtaataggcatacaatttgtcaagagaccacaagccagagcttgaagctgagagagacagaatagtaaaagcagggggtttcattcatatgggacgaataaatggaagtttaaacttgacaagagcaattggtatatatttttacttgctcatctgttaataagccacatatcactcggtgtcttaagcgtgtgcatacctccttgtaggagatatggaatttaaacagaacaaattcttgcctcctgagaagcaaatcgtgactgcaaatcctgacatcaacgttgtaagcactctggttctgaatgatgtacctaccttcaatttctgcacttaatcatgatcggctttgatcaatcaatccttccataatatcataaattattattcttaggttgagctttgcgacgacgacgactttcttgttttagcatgtgacggcatttggtgagaatctctacctgcaattttttatatacacttgttatatcattcattactgttttgtactgttttgcacgcagctgaagtgcattattcgtattctctagccacagttaaaagtacttttcttctgacttacctagtgttcctgacataaataacaagattgtatgatgaacagggactgcatgtcaagccaacagctggtggatttcatccacgagcatatacagaaggtaagttaattttccttttctaattccaaataccaacagtgaactttggaggaggctgtagtacttaccaattcagtacttgccgtgtgaaaaaacaaaatgcaggagagcagtctttctgcagtgtgcgaaagagtgctcgacagatgcctagctccatcaacaattggtggagagggatgtgacaacatgaccatggttctggtgcagttcaaaaagcctattactcagaataaaaaagccgacgtaggggagcaatctgtgaaaggtgtggaagaggctgagatcaagtgagtagaccttcatgccaccatatctttctttcatcaatcattttatgtaaccccttgtcagtgcactaactcgaaagctttgtgaccagtgctgctgaggagaatggttcttgacgccgatgattatgcagacatttgctttcataagcaggccgagtggagcagcagtcactgtgtgtgtgtgtgtgtgtgtgtgtatatatatatatatatatatatatatatatatatatatatatatatatatatatagatatatatatatatatatatatatatatatatcaattgtttgtcaaatgatgtatctgcacacattctgctcaagaactcggagataaatggcactgaatggagcaactgtgaaaacctaatgcgcagtttttgtgcgccatccaccattcgttgtcatgccaaaaagttgaccgtcctgattgtggatatgatcacaattgtcgacaattagaactgatcaagttgctgttttctgttctttgcatacgctgtaaacgtgggcgagttttttgttctgctgtttttttttgggtgtgtgcgtgtgatagatatgtcaattgcaattcatgccccatttgggttattgcttcagatcatgtccaatctgaatccagtttatcatgtgatatctgttggttagttcagtgccgtgctgctgcggtgctgccctggtgtggtgaaaatgtatgcctgttatgcatatggaagtatggaacaatttggggattttgcaaaaaggaggcaatgcaattacatttcatattataaaatttgtctcaaacccagtatgtgaaagcataatatctgacaaaaaaaatagattatggcatgatgtgaggctttaggccgtcaattagattatttataatgtgacaaaggaaggacaagatctacacggatgcaatagggaatgaccctccagtgtacacatgtagtctgataagacagtctatttcaagggacattcgcctgaatttcatctaaattcgaccgaatatctataactaaagataataatcatcacatggttcaaacactaccgcgaaaacaaaaggctagtcagccatctctacattgacaaaaaccacggcaatcgagacaaataacagttgatttcacctaggattagcagagctgtgagacttctgtttcgccttctctatcaggggcttcaactgctgcctctcctcaagaatcttgaggaaattgaacaagaatggcacatagttgtgcttcctcctgatgttctctgtcttccacttcttccacttctcttcctccattatgatcttctctgttacagcctcaatatgagcagcaacctccgcaagagagtgctcaacagatggcgcgtgcctattggcggaaggatcacccatctgtgccaggaggttctccctcttcctctgaagctccttgagttctaaagtgaacttctccctccggttctttaggatagccatgacgctgaaccttatctcattctgagagaaccgatcgatgcgttcctgaatgacaggctgcaccatcctcagccaacctatgtcgccaacgccacctgggcatttccccaggcttattggcccttcctttagcccatcaagctcatacaggacaccgtccacaggaacatagctaatgaaatggtagacatcatcatccttgacagatgatttctgctcctcggggacttccggccttgcaaatgaattactggccaaacggatgctctcagaattgactatagccaatcctttgagatctggtggcaagtcctttgcaaactcctttagctttttgagctcctcactaagggtgatacccggagagtttaatagaacagaaacgatagcttgggtggcacatgcattgttaattatctgtaagtgaagcattgagttgatcataaaaggatgcagaggagtgaaggctacacaaaaataaacatataaacagctctgacctgcttagcaaagaaaaggtttgggattgggtccttgataggacgctcatctttttctggaggttgccatttgtacagcacaatgagcccataaactggcctggaaagcaccaagttaagttggtttagaaaagaatgaaatttatgatactgctagcaggtattaggattacatactgaagatcattgagggcatccagatcgagtgaatagagttcatcaacctgttaaggaggaataacatagaatgtcatatattaccattcaaggtcataaaaaaaattctagtgtcacagatataagcaaaagtagaacaagatctccaaaaacatatgccagtacattgcatgcatgttttgccatatgttttaccaacaaaatttggcaacaaggttgtatttgaaaagcatagtttttattattcgtgagctaagctaaaaatagagtttcaagaaacaacatcacacacaaagtgttcaatacctgaaggcaaaaacatatattttcagcaaactttagagcataacaaagaatggacttaagtaaatgggttacatgattacttacttgaagacccttcagttgcatctgttgcaacagttcagtaaaaatgcctacagaagatatacaaaagaagggttattgcctacttcattggggaaaaaaaaagccaagtggccaacatttacaggggaagcaaggaatttaacactgaataagaaggtgtaacatggcagatagacctagccttttccaattccaatgaaatttgagttatcttccataacagctaattgactgcgcctcctgttcaatgtgtcccttaggactactggactagaaattaccagagaaaagctgtgaaacaggcgtatctgcccacatctcaatccgctattaccatcgaacactaaacagttaaaccggcagctcagaacaccaaggtccaacagcaagcttggtaatctcatatgctacttaaaccatagatgatgtttctttagggtagtcagaaaaatggcccataacttcaggaggagttctctccaatcttgtgatgagtaaagtggtactacttactactggtagtagttgtttattaaaacacaaaacaaattctaaacaacaaaacaatgtatagagtcgagtcgccgaaaattcagaatttgaatgaaagtcacaaatggaaggtagcgaaactcctccacggatgcgcagagaaagcctagttgaattgttcatatactacaatccatctcttcttttgtatttctactccataaaggtaattgaattttaccaggatcattctcgattgcagcccaagacatgtcgaagaagaaaccctgcgcaccctcctgcaggtctgcagatataatttcgcgtatcaaattaaattgaagcatcaaagaagttatggagaaacaagagctgcctgctgctgcaagaaaccaaatcttgagctaaaccaaattagacgaaagaagaaacaaatccaaccaaagggcttcttcccctaccaacgagagaaaccgacggtccgacccggcagaagctcctcctcctcctcctccttcacgaaccgcgcgcgtcgggccagcgtcgacggaggtggcgcgcggcgcggcggagggagcgaagcggattcggcggcggcggcgcgttggtggactgcgtgcgtgggtcgtcggcgatgggtgagattggactggagagagaagagagagagagagagagagagagagacggagatggttgggcctcacgggagggagtagggcacgggcccatgaaagaaaaaaagtccgttttcaatccctcaacttcacgtcaagtttaattgacgtcccaagtcgtaatcccataaatcttcaccctttatctttgcaaaaccattcacaaaaccattcaagttatgaagtactaagtcctaagccaatatgaatgtgtggttttgactgacgtggcattagaaaaaaaaaacatatggggctcaagtgtagtagacttccacctctcgctgcctatcccctttcttccccatctctcccttctcttatccaacagtagagagaaggccacaaggggactcgacttactcaccataaaaatttaaacactaaaagtagctatattttaggaattgggatgtaacggatgaagtagcaatgagaactttggcacccctttagtaaaaattgagtttattccaagcaattttgttcgaggatggatgaatttatagtagaatttcagtttgaaaggcagcctcaattttccttatgtgaagttgatgccatgtgctcatgcgtgattgatttgtgagggtttgcatttttgaaatggaggaataaagcgaaaaacagtagtactttctatatctttgtcgacgtttgatgtcgcgattcctgtatttgcatagtatggggatcgttggtactaggatatattcgagattgtagtaaaagaagatggagacaaaaattttatacaggttcgggcccctgaattgtcaggtaatagccctatatcctgttggccgaagccggttgttgctcttattcaccataatcacaccagtacaatatttagggtagcctatctatctgttatcgatatagcggactgaagtatcatcgcgtagtcgacaacagagtaatcttcctcctcgaatccgtgccctgcgagattagagacagcgctagattcctctctttggttcccgtaggtaccatatggggctttgctaggcttatctctgatgtcgatatctggcagcttgtcttggcgtatgtaggtttgtattggcttgtggctttgtggcgtctatgttgtccgtgtcccctctcctcttagggggccttgtatttatacccataggtgtctccttatccaagtagaactaggaaaaccaatatagatacaatccgagtagtccatgtcgtttccatgtagaactctagtcatccttccttatgcggaactcctcatatatcccaatgttgtttccgtataagacatggtatgtggtgggtcctaccaagatttagtcaactactattaggtatgtggtatctataaccatcacaatcttatatagtcacgattagcataaagataaaaagaaatattattggatcaattcaataaatataatgtgattaaagatatcaagggtgaaggattaaaaaaactcccttaaaaaggatttaaaaaaacaaatttaaaggagagaggtgctggttaattacattcacgtatatgtaaaattataagcttttttgttataacaaatttggccatgttatttttgttacacaaatctaaacaatagatatggtcaaagctaacatataaatcttggctgcccagattctgaaatgatactacctctattttatattttaacttattttgatttttttgtcaattttttttaagtttgactaaatgtatagaaaaatttagcaacatctacaatatcaaattagtttgattagatgtaacattgaatatatttttgataatatatttgttatgtgtaaatatattgctacatttttactccataaacttagtcaaacttaaaaaacagagtacatttcacaaaactacaggtattttgcacaatttatcacgaaactacagatttaagagcttgtttcacaaaactaaagatttagtgtgttcggttatcacaaaactacaggtactttgtacaatctatcacaaaactacagatttaagaacttgttttacaaaaatatagatttagtgtattcgtttatcacagtgctacacatttagtgtcttcatttatcacaaaactacagatttaatgtctccattctcacaaaactacaggttttagcattgttaaaacgtgtagttttatgagaatggagacactaaatctgtagttttgtgataaatgaagatattaaacctgtggttttgtgaaacaagtttttaaatctgtagttttgtgatatattgttcaaagtacatgtagttttgtgataaacaaagatattgaatctgtagttttgtgaaactagttctaaaatatgtagttttgtgatagattgtgcaaagtatatgtagttttataaaatttactctaaaaaaatattaactatgaaaaaaaataaaactaggattgagtactactcatgtgtactttgcattatgaaacataaaaaaattactatcatgtctcatattttgagatgagaagaatgccaaaaaaaaaaatgtatcctcagattattcaatttgtcatttacccatctctctctctaccttttctcttcaacgatatcctctatcccaaaaatcgagccttttcctccccccttcctcctccaccgccgcccatctcgccgccgccgccgccgccgatggctccctccaccgccctctctccggtggccttcaagtcctccttctcgccgctcctcttcaacccgacccgtaagccatcctctccctccatccttctctctccgcgcggcggagtcagccgtagccgggcgctttccgtcgtcgggcgccgctgccagcgcgcgcgcgcgcgcggaggaatcctccacggcggtattcttcggagcccaattcgatcggggtggcctcgtctccgatgccgccgcggcccaccgctttgcctggcgttcgtattatcgggtggcctcttaactctaattagtgcggatgcgagttgggttgctgtgcttgcggttagggtttcactgggcgttaaaagagagaaaaagaaattcattaagtctcaatttagttgaatgtttttgcggcggtgtgtggggggagattgttgcgtttgtgctgttctaggtgacggccggaaatatttggtttgtttttaggtttgacaataatcttttcgtcggttttcggggtccttgtacaattctatcatttcaaccatgtacaaagatgttccttttttatgttaggaattggtttcatttagttctagtggacatacgattctggcatgtaggtaatttatttcattatggtaagttttctgttgtagtagtatctgtttattcagggaattgtataaaatggagcattacacattagcttagtccttgggcttccgttctccccttttcttttgatcggtggagctttgatctttgttgaccagtgcgtccttgttgattatttttcttatgttatagcaacacctgaacattttgcacctgttgtttctttgttgttcaggttctaagataaatgtcgaaggtgcattctgtttgccatgttacaataggaaaaaggctagcaatagatcctttcgcgtgtacagtttatttgggggaaaaaaggacaaagacgagaatggtgaagaagcaccatcaaaggtaagaaaattagatgccttctttcaatttgaacttctgttgtactcccaataactaaaagagtatcttcatggatgcctgaaatgaaaacaattgcaaattcacaggtggatgtctaccttaatcagttcaatactatgtgctattcatatctttatacttttatctgaatagtaatatgctcaagataatgccttgctcattgcaaattctgttgaagtcttaaactcctgtagaaaatagttaagagtgtaactcatcatgttgatatttcagttcgtgctgaaattaaattctgcatataattttaagggaatataaaatattttaactaatatgtacttttgttatcacctctactttatagcttctatgttcagttttcttctctttccaatgaatgatgccacttctaaaatgataaacttttactttatttgggtatttgtatagttgactaagatgcatgagctgtattcactatgttcccttgtttgtgcacaaatacctagtatagtaggcatttttatttttgtttgtaaacatcttgtagttctcatttttgtacttacttttaggcaggaattttcggaaatatgcaaaatctttatgaaactgtgaagaaggcccagatggttgtccaagttgaggctgtccgggtgcaaaaggagcttgcagcgtatgcatttggatatctgagtaatatttgatatgttatcgctaaatagcacagcagtgtgacttttttcctcttgttttaggactgagatcgatggttactgtgaaggggaactaatcaaggtatgctttggattagttgattaatgttgttgttaactgaattcttgctagctgtatgtttcattgtgccttgaacattgaagggtttctttgttaaatgactgacattttagcattgttgaaaaagcctgttgaacttgagccaggctataaagatcacatattatcactgacaaacattgatctttgtttcactgagaaagggcggtcatttcctacagtaaaaccaaatatattcccttatatgttcttatactgaagaatggcatgtattttttatgatcttaattaggttgatcgctatatgaagtaattaaaatcatttggtatctcttttagctttggcttagataaagttatgttgaaaaggtaccatcttggcacaagaacactgtcaaatctgtgggcagggaggtggttataagtcatcaaatgatttatggtggcataggttgttaccgtttgaaaaggtcactgtcttaactcttaaagccatttgaaaatgtgcatgttaataatgtcttagcttttcaaatgacaaaaataacgttgcaataccttgacattttctcccatgagctaagtgctatgctggtatattttgtagagccatatgctgtcaaagtttgctaaatcttatttgtttcttataagtttagcaggactatccgattattacattcctttgcttttctcgaaagtagaaaatcacatgcatatacttccggtgcaagtatttgacctgattcattaaccaggtaacactttctgggaaccagcagcctgtaagagttgaaatcaccgaagctgcaatggaagtgggtgctgaagtatgtattttatctaccattttaatcattttctttgacgatttcttgcatgttcgcatgatttttggcatgagtcaaccatttcaatgttcacacatgaatttgataaataccttatgtatgtacccgttagcagaccaaaacaaaaccaaattgttcaaagtgtgatatatatagtatcctttcagaaactttctgagctggtgaacgacgcctacaaggatgcacatcagaggagtgtccaggtgcgaatcctgctattactttttgcgtagaaattgaaacttgcgttctatactaacacggtactgtacttaaaacctgcaggcaatgaaggagaggatggctgatctggcacagagcttaggaatgccagcaggccttggtgatggactcaagtgatagtgtggtacatgaatgcttttcaataaaaaaaaaagtgtatctcaattttgtatactagctgtattgagtcatcagtttaaaattcgtggcgagtactgttagctgtgtaagaactgtaatcgagaacatctgatcctgttttccttaatcattggcacaccataatgcattgacgcaagtgtgctgttttacaactgctgttgatgtgcagaatgaaatctgttccaaacagagaaatgggtggatgtggggaggctaattcatggggcacttggcacttggctgagctttatatagtttcagaggccttaatagtatataatggctttgtttggcccaattaaggccattgttggggtcaatagtatataatggctttggttggagatgtgccaaacaaggtcatgttaggcccaacttagcagttgttatttctgtgagtgttagcatgagatgaaactgtctactgtcttaggctgtgtttggcacccttttcccaacctctcttcctcgttttccgtacgcacacttttcaaactgctaaacggcgcgtttattggcaaaaagtttctatatgaaaattgctaaaaaaatcaaattaatctttttttaaaagctaatacttaatttatcacacgttaatggaccgctccgttttccgtacgtactgtttctggaacaagaaatggcaaacacagcctaaagtactagctcgctccgttttccgtgcgtactgttcctagaacaataaatggcgaacacagcctaaagtactaggctcgctctttcatgaacttccatggaagatggaaccttctagttcgagtctacactctacacatatagtccaacggtaagcaaaaaattagaagaaaagaaaagaagatgtatcactcacctttttatcagatctcaaaagggtgaaattaaccacacttccactgaaagctcacacaaaccttttaatcaaatctactttcccaaaatttaattaaccacattcttttccaccgcctgctagattttgtagctgtggtaatagggcacgtaagcctaatcttagtggcagttaaatataaacacaacaaacaaaagaaacccacagtgattaaactcactttaatcatggtaaaagtggagaagatcttgcacatccacctttctgatcaaatcaaaaccactttgtttgagaagcttagcatcttttgccacctacatctgatttgctaattgcaactcttctagttctagcttatcatcacccaaattaattaacccttgattaaaagccaaagctattaattatattccaactccaagtaaattcaattcctccccatctagctaggcagctagcctttaaaaccatgcacaccttcaagatacccaagcaaggagatacccttgtcatccaatggaatggatgattcccttttggctccttttgttttgagataacagtacggcttataatatattctcctgtgctaattaaattagggttcatgctgagctagtactactcactagtactgatgtgagaggagaatgttgggtgacatgtataaagtcttctctgtgttgaactggacacgtttccagttttaagaggctgcttagatggctaggaaataaacaagagatggacacatggcaaacagctagcttaattagatgcctttctgtttttaatctgtattttcttcagatagtacatgtacgagtagctagcagaaaaaggtgttaagctttatttcatcattatttgggagttaaacctaatgaaagatgtactatgaataaaattaatattaattagcaatatattaagatatatacagatgagttgagacttttgatgagtagcctaaataaatatcttggggggcacaccgcatgctttcccaaataactcaacttgattcttaatgggctaatgatttgccttatataagcatatgagagctaagctaccatatatatatatatataaaattaactattgctgatagtttgacgaaaagccgtgatcttgttaaagcgatatattctcatatctatatcacccgttcttcttggtctaatacaatgttctagaagtgggtaatatgtgaaaaaagggaaaagttctctttccaagaattacatatatactatgcaaattaaaacatttgttacatgaaaaaaaagcatttcctatacaacaaaatatcaaatcatgctgtgttttttgccagaagaatttcctatacaacaaaatatcaaatgcaacaaaatatcaaatgctctctcaagaacacctaagagtttagggaatcaagcgagacacatcgcctactgcaacagcggaatgagcacccgcatcggctgggcaccgcagggtacatcggcaaggaggcaatatgggcccaagaagatgcagccgctgcagcagcgaatgtccatgccccgttttcagacatccctgaacaaagagctcgcaactgggcgcgggcaaggggtaaggtcaacccggatggctctgtcacatttgagaacaaaagagatgccgtcgtctatcaggaactggtgagttcactacttaacctaactaatttccgttcgtataaagtagaagttcgtataaatgactcttttttttctagttgggcttggttgctgaacaagcttcacaaagcaaggttgagtccgcgccgaagaggcgcgaagatgacatcctcacaaaggcgctcggaaccaaagaacatcctggccggactaggggaattggtagcgatgtgccctggaagcatggactcccgcagtacagttcccaatacaagaaacggaaagtctccaaggaagagagggacgctcgtttgaaggccgaacttaaggttgaggtcattcaagaactagaagctagcatgaacgctagggtggaagaaagggttaacaaggtcctcgccgacatgaatataccccgaggcacaacacctgctgtgcatccaactcctcgtgcacaacacgacgcgagtccgtcacagcataggagtagttgtgcatccacagaggtgctggcccctggtctcccggtcgcaccactagctgcagtggaccacatagaggtaattgatgttatctgatccatatctaataaaaaagcctttacacgttccaatattaaattcaaactttcacatatgtagggcgtagcacagtgtgtcctactggcgagggtccacccaactttcgctcccgaagtcgctgagggcatggctttcaagccctcggttacagacaaggtccacggtgcagacctgctagctgggtatgccaaggtgtccatcgatacagtaaaggacacctggtcaggctatccgctgctcgtgccccccaatgatgaaatcatgactttgggcgatgcgcacaagacgttcatacaatggcctaaagaagacatagttgtgaagatgactcctcgtccaagtcgaccgacggagcttacacctcccaagtctaagctatcaattgaggctccccgtggaccggcattgtcagtacctcattctcctggtggagctgatatggacttggcagatatagctcaaagcttggctccaataaagaccacaagaaaggccgatagctccccaccacttgtcaagggccagaagcgtgaacgcggcaaggggaaggtcggggagttggcgccggagccaaaaaggggcaaggcagcgacatcgatgccggtgagcaaagcggggaaggtcgtgagggcgccagcccaatttgagctaggcatgccattggtggaggacaatgtgttagccgtgatgggtattgcttgccgagagctacataagcaatacatggagctaagcaatgccaagtggaaaatgagggagtcatccatagttggacatcacgaccaccagccgttcctatcgtcgcctgcctatataactataggctttgatgacctcttcgaccttttcaggattcggaagttggacactggtcttctaaaatgctactccttgtaagtgcataccttctatacttgtgatatgattggactatatctcctaattaaattagttctaatacataaatgttttaaggttgtgttggatcgagagtcgtcgccttggtaatcaggttgggtttcttgatccatccatggtgaacgaggttaatttacgatagagcttcactgaggtggttgactatgtcaaccggtgtttatgggcccatcaagacaaggagtacatcatgtgcgcacacaaccaagagtaagaagacaatacccttcgtgtatattgtttttgaagttaaggttcttagtactaacgctacataaccactgcgcaggtgacattggattctcctagtcatcgtacctaagtggagtagggttacctaccttaactccaataagtccaaagattatgatttcagtgaaatcaccaaggccttaaatatggcttggggcccatatgtgcaaaagggtggtaggcacaaggagggcaaggacgaactttatcatgacaccaagttcgcatgcgcacaacagatcggagaccaatgtggtttccacgtgtgccataacatgtcaacacttctaagagaggtgaaagattttgaccctgaggttgttgctaatggcgaataagctcatttcaatatcaacattgctattcaaaacgtgctaacctcttatttattaaacagaaaggtagagctggcttcaagatctcacccatcaaccccccccccccccgcgctatcagaggctaagtgtgcgccttcattcttgcagaaataatgaacaagaaaggacgttttcacgtcaaatagactcatgaacttagctagataatttattgtgatgtaaaaaaatgatgtttttataatttcttgtgatgtaaaaaaatatgtttttatggagtgcaatgtaatttactttcatatgtgcaatatttatggtagtttactaaattgtcatccaatttgatcaactacaatttacgttgtactattcatctgttttctccttttttttccttattgacaggttgtggaggttgaggacattatggctttaatccatttggtaagtatatatgcggttctatgagcaacgaccgaaattgtggctttcaaggggtgtgaatttgctgtgcaaaattgtggcatttgaactgcatatgtgaatgatgtcaatttttgatatggatctgtgttgttggggatctgtgatgtttgagatggatctgtgatgttatattgaggggatgactagaatatatctgtgttttagagggcatggctagcaaatcctgaggctagccaatatttagcattttttttctggaattaactcatcagtgacgggttggaacaaaaatccgtcaaaggtaacctcacctgtgacggactagcaaataaaggcccgtcagaggtgacctacctgtgacgggcctttacttttggggttgtcacaggggtcgtcacaggtagatcacctgtgacagcttctaactacggagaccataacctctgatggcctttatttaaagggccgtcagagatgagtcacctgtgacgggtcccaactcgtcctaggctagcggagacctacacctctgacggccttctagtaacttgcccgttagaggtgggtgtcacctgtgacggccggccactcgtcaaaggtgattgaactcaccagtgaccacttatcattgaccatgcgtgaagccgtcaaagatgagggtttaggcccgtcacaggtgaccttggccagtgtagtgttagttagtactactcatgcatgtaattggcataatgctggatttggtgctgaaatttcgtgccttgttcatcaggatggacagtgtcatatctgaagttgatgtttctcttatcctgattagccctgagctttcccagagaagactcaatgtgaagtgtgaactgctggtataaatgcattcttttcaggagtttgttagcctcacttgattaagctaatgcttcaagtagattctaggagtgttctgctgctccaattgattaataccccatgatttggatctgatgagtcaactagtttcagcagtagtggctgcatatatataataagcacgcttgttgattactcatgcatattgtcatttcaggtgctatagaactttgtactacttaacaatggagggcacactcctagtagatcaaaatttgatgacctaatgcatgatatatggatttagacatgggaataatttggggacaagtgtagttgacagtcatgctctttaggattctagtgtgttgattactactctgaacatgtagtagtgagcctatcccaacacacatccataaaaatattcagattgacattgactcaaaatgcatgcatgtatatacatacaaaatgatacataatttggaaagcactaatgatggatctaggggttatgtcgggctccaataattcttttctttttgtgcagattcaactcgtcttcagaggaaaccagctaccttgcagctgtttctgatgacaagcttagctactactactgtcctctactgtactagtgtcctactagtaattgcaaaataatcgacaataatgtccaggggagactgtatggatcgattctccatcagccaatctgagaacaagaagcataacaacaattttttttttttagaaacacacattctgacgtacagcgttgatttctgatcaaatagttggaatcagggttttcacttttgatttcgccaaaaaaatttggtcattttggtagaactgaacttcccgaaatttcggaactttttcaactgaaattttaacacaatttaactgaatttgactaaattttgaccaaattaaaatttttttaagaaaaaccaaaaatttcgatcgagatagtgacttgccaaagaggtctgaaattaccaaaatttcgaaccgaaattgcaatcactggatggaacagataggacaaagtctgcatcttttgaatagaaaaactgagcggttcttctctactactttcatcggattatagtcgcagattatttgatcaatggctctaaaaatacgttttctaaaaaattcttctgcttacactaattattctaagctacttctatatgttaattttatttttaaaaacaaattatctctataatcaagtactcctagataatctgatcaataatttgttttaaagcggggaagaagagatgagatgatccatgaatagcataagttgccttcagattagggcgcagtaggcgtctggctgggacagggtagtacagcaaagctcaatgtccatatgcagatggatcgatcatcgatcgatcacactctgaaaaatgctaatgctggtttctgacataattaattaaggacccaatgctgtgccagctcttgtccctcgacaataggccctacctttcatcttgctgcatgaaaactttcacctggaaatgttcagaaatcagaatagcaaagatgagattgttggttagaaatagctagaaatgcttatattttgggatggagggagtaaaacagatttaggttaattaggctggttattgtgtttatatatacccaatcagcaaacctattgatttgcagtctgcgtgcacatcagcaggggacaggaaaataattttcttaagagaaaaatgacattcagtaagtgcatctgagtcagcctttggattagaaaactcaactgggcaaaacttgaaaagtcatcacactgatcaggatacaatcatacaatgggcaacatgtaccagctgtcagcactgatgcttttcttcttgcctctgcatctcaaaaacaaaacaattaataccatatatctgatgatgtgtctatggtgtgtgcacagttgcctctgggtgcttgaatttagttgggtcattttctgaaggctacagttgagctgtcgggaaaattttcatcttcctcatgtagatagtggacattaatttcattaagtaaataaaaaacatttagcttctgtgcaaagtgcactcggacaaaacaacaaagaaaacacaagaatggtataggaactttacctattacatcttgactaaaatttcatcttcctgcagaaattgagttgcttttctgaaaaattcctccgaaaaccatgtgaaattggcgctgaatctagcattttatctcaattggcgcatatgccattagctaggttatttgcttgtgataaccttggaacaaggtgttgtcacttgtcatcatgaggtagccagctagatgtcaatttttttttcatgtttcatagtacatgaagtcatcttccaacttccagtgttgctgccagttgacaacctagctagcatccaagaggaacaacaagctttggcttagctagcaaatgaggttaggggactattaagtctaaaaccatttgtttttaaccttggcaagttttcaccattcaaaagactaattagtgcttaattctcaacaacccaactataagttgtctgaacaataataaacagtaatacttatgtaagcctgtcgggggaatgctgatctcaatgacattattaattattagcccttttagtttccatgaaacatatattgcgtaactagtaattctttgtggaattgtgtccccctgtacatcttcccaagtgtgtataaggatatttatatatttgggaatgctagaaattaaagagcaatttgtctctatataagtgcttaattacttacattaatcgtatccatcatacattgcaatttggcaagcaaatgtcgtattataggcgctaaagttaatcatgtcgatcgtcaccaaattttttcgttaatggaattgaatccagcctgtcgtcaccttattagaaatccaacatcttatttgattatttccaaggaaaaaaaaattgttacccatgacgttgcacttggttagcacttgctttactacaccacgaaagcattattagcaaatagagaattaataaatactcttttccagccaaacacactacaatatatctgcaccatctccgacaaaaccacatcatttaggtctacggtttgttaaagtgaataatgtttcgtatttaaaagtttaaatccagtctgagacaagagaagagggccaaaacatgtacttatttttgtagaatattgttttgctatctctattgcattgctaagaaaaaaatgcacgcggtacaattaatattttgcgctccgatcgacacagagaaaaagctgatcccaagatttcaattgagttgtagagcacccatggatatctgaggcttatctcctacggagtacgatcaagaccctctatgtatgactattaatttatatattactctctctgtttttttaatgtatagcgatgttgattttgtaagatacatctgacgaccattcgtcttataaacaaatatgtaattataatgactttatttatcatcaaatgttttttaagaataatttttatttgcataaaaaatttgaataaaacgaatgtcaaatatagataaaatgtcaatggtgtcatatattaaaaaaagtattatcacttatacataatactttatgtcctgtgtaaaataccatatcccaagtgatccttttgcaaatctccttttgagccaccacctttattaacttctcttcttccacgtatagcttggagtttggcagaaagatggagacaaacgtgaggccttccatgaaagctcacatcctttcttagataaataactagcaaattaaaggtaaaagcaagctcaactgaattaagccgtaccaactagctttctagatagctaggacgaatccagacgaggtacaagtagccatgcatatcaaaatttataaatccaaattaaagcaacacttacattcgccaagaatggcatatctgttttttcttttcagataatgaagatttcattaagcaaataaaaatagcttttatacacactaaatattctcatgtttcttctgttgattgtttggcctagctacaggctactgctgataagccgtaaatggcatataagcagaacactaattatctgcggctaaaacttttatatctatgttatcgcggtttaaatgtaatgctgaaaaataaactatgataatatctcacaaaatcaattccaaaattaaaattaaaaattcaaattttaggaacagcttatttggctcctaaatagtactatgtatactactagctacttgattttctttatattttcctatacacatgatgctactaccatagcccttagttggtatatataaattaaatcatctttatttttttctttggaattttgcaggaagttgcaggtgaaacccatataccttaagcaagatatgagacatggctgctgatatatttatgcatcgatcaggcatgtagttataaagtgtgttttgattggtcactttgctttggtctttgacactgcaaaagtgtggggacacccttaattagctgcttctccagttctaaaatataacaacctagaatgattagaatgagatttgacccattctaaaacaatgaaattggacaaaggctttgtttagttcccaactttttcttcaaatttttaacttttccatcacatcaaaactttcctacacacaaacttctaacttttccatcacattgttctaattttaatcaaactttcaattttagcatgaactaaacatacccaaagttctattcagatcggtcaaatctcgtcctaggttatagcattttatgacggcggtactaccttagctgccagaccatatgcatatatatatacgcttctctccctaccacacaggccccacgttgttgcaagggacatattgattacaacgatcgtcacttcgtccgttacaagctaggcagtttctcttaagcacacaagattagcaatttttataaatctaatatccaatattaggccaattttattaagtattattcgagacgaattcaaataccataatacatttatttaagcattcctgtagttccttgagagcgcttgtaaagttaacttaattgttgtactagtatatacacatactaatataaaattaaaagactagaatgtcttttctttaccaattcctgatgtattagtcccccaaatttataaagttaggttgacacttatctataaagcgtttacaggtctgatacgaaggagcgtaaaaaccccgattcattcttcaaaataactcagttaaaaggtagatggtcatgacaagcctagttttatgagcatagtcatcgaacatcactatactattaggtttgtcatgacatctataccctctaactgagttattttgaagaatgtattatccctaattttatcaaatcctaataataatatgtcagggttataaataccacatacctaatagtagttgactaaatctcggcagcacccaccacatactatgtcttatacggaaacaaccttcggatatagaaggagttccgcataaggaaggataaatagagttctacatggaaacgacaaggactactcggattgtatctatattagtttccctagttctacttgaacatggagacacctatgggtataaatacaaggccccctaggaggagatgggacatggaacaatagatcaagacacaagatcaacatacaagccaacatgcgccaagacaagacgccggatatcgacttcagagataagcatggctagtcccctatggtatctatggatactgtcaggagagacatagcgcattagcgctgtctttgatctcgccggatgcagattcgaggaggaaggctaccctgctgtcgactacgagtcagcacttcagaccgccaagtcgacaacagttagataggctaccccaaatattgtactggtatgattatgatgaataaaagtaacgaccggcttcggccaacaggatgtaggagtattacctgtaagataaggggctgaatctgtataaaaatccatgtctccatctcttttacctcaatctcgcatataccctggtaccaacgatccccataccatccaaataccctattcgtgactatcaaacgttgacataatgtgttaactatttaaaaaaaaatctttgtggaacaaatgggagagaaatataaagttattttgggacaagggagtaaatttaaataaggacaaatttaatactgaaactaacacacagcgaggaggacgttgggggataatctgagggcaatctaaaattttaaggctttgttcggcattaccatttttcaacttcgactcccccattttttgtgcacgcttcctaaattactaaacaatgtgtgttttttttaaaaaaaatctatagaattgctttaaaaaatcgtattaatctattaattaaagtcatttcgtcaatcgtgaggggatgagtagatcccaacctgctcatctgaacacaccctaaatatctcatgaaatatttggttgttaacactagtctttcgacagatatttaggaattgattgtagctgcatgatatatcatatcgatatatccatgcattgtcaatatgatgtaatgatttgcatggaggattttttttctctttaaagaaacatatcgtgcaaataattacactatatatgttttctgtacacatatatatggccccttaattaagcagagaatacctcaaaaattgtttctcaatagtaccagaacgagatataccttgatatgtatatatagctagtactctgtacgtttttttttcttgagatagaggtggtgtatatactacgtttcagaaaccaactaagatcgatgagctgatcactagcagactaattatgcataagtgcatgccatgatcgtaattaagtgtcctaattgacacaaatatgtatataagttaagtatattcgatgataattaaggaatgcaaatataatacacgctttgcatgcatgattaattacacacaaccaaaccttgagtaagtgggagcaatttacttaaagtcggtgtgtacgtgcctaccatgattagctacgttaagacaaaatttttaaaactatatattaaagaagtatatacatagatacttctctaactggtgggcaagccatatattcaagtcaaaatgcaacaaccggatcaaactgtatgaaatgaattaattttcatgatttgcctgaaaatttgaaggcgacatgcatgtacacgttttcagaattaaatcgcggttgatcacagcatatctgggatcagattccaaacaaacaatctaaatgtatgaatgatattgatgaacacacatactccacctgtctcaaaataaaccaacatcgtacaggatgtgacatatctatgtatgtccagatttatcatactcgaagatttattttggtacggagggagtaattaatataaccatgcgtatgcgcgcatatatgcatggtcctcttctctatcaatatatacgaggcaaagttttgccctcttttttttaaaaaaaatatatgcatggtccctagctagttacaagaaaataattagctgcagaagactgaatgtggtcttctgcaggcatcacggcttttgggagtctagtaggactaagcccccccccctcccctcctttgtaggagcagttttttcaagtttagcttcctgtagcaatataatggccacctggccggttgtgtcatataactaaaactctgttttcttgtcctgtagcaatggccacctagtcggttatgtcgtataactaaaactctattttcttctaatatattggcgtgcattcttttaaacggaattacttggatcatggacaatgtgaatctttaattagctagctatggaacatgaaccatagtgtttttttagatggacctgtggaccgacaagaacctgagtaggagagagcctatgtgcaggcagctggctaaccgctaatgcatggtccaggctttatctcagaaaaaaaatagtttggttagatacgcatcgttgcatgcagtagctcaatctatctatgaaccaaaatgtatattttctgatcatgatgctatgtcgaaatgtgccctaccttttcgtgacatgatctttagtaggtactaattggttttgttgattccatgtacactccaagtggagagataggagaatctatattagttgctacaaataatcctcaatgtgaaccatgagcacatgtctgtatgtacaacatatagctagctaagcaactcataattactccctccggttccatattaattaacgttttggataagatggagatcaaacttttataattttgaccatcaataactttaaaaaatatttagcgtaaaggaactagaacaacatatatagatttgtctttcaaaacgctataataaaagtaaacatatatttatttattatatatattataatagaaaaataaggttaaaaatatattttgtagaccgtgtcattatctaaaacgtcaattaaaatggaaccgaagggagtaatcactaagtttgacctttattttttttcatacataaggttaatgaaacaacatgctccgttatttgtgtgcaatttattcttacagttaatctttgtgttaattaacaattaattaatctcattttattgttttggttaacaaagcttatgattagttctaagcaaggcacctatcaaataataccagtatcgatgtagacacgtcttgcaaggtctttacctttttaaaaaatggtcttttacttggtcattgacttcatcaagtgtatatggagtacttgacgatcgaagtcaatagctagagtccctgatcgacttggaatgcaacagaaacgaacaaatcttattttcagtgcatatatataatatattatatatggatgattagataacctaattagtttgaatggattcttatatgctcaagaaaaaaacagtgacatccgcatgaatgttcttaagttgacttgcatatttgactggaatattctctcacatatatacatctcgatcatttattcattaatacatcatgcttcaccaaatattaaaattaaactagttgcattgctagttatatatgtgtaccaagtttagccactcgaatgattctaaataataagctatctagcacaagttggacccaagataatgagacacatgacactgcacaaagtcattactggaaagaaaactgcaacctctaaattatgtggccaagtttggtagcatacaaacagacagtgagctaaattaaatagcactcctggaggcaataaaattcagaatgcattgtacacaggctaactaattttgtatatagacttcactcaatgtgaacacaactatttttgacctcctctaatgtatagattataaagttttttttcctcgaggggagattgtatatatgttaatggtactacacttgtagacatgtcacactaattaattggaaatgaacccggtatgctcgcctggtcaagacgatgtcaaccttaattattaacacgccactagcttagtcaatatgtgctttcatatatgctcaatatctaattagcattattggtagttcattagctaataagctacacaagttgtacaaatatactcctctccaatattttctttttcatcgtcttttcactatatcttgatcaagatttcattggctaatcgaccattaatttttctaacttacgctaccatattactaaaacagaggcgataattgcaccctcgcccactggatctctgatctactgtactgtaaatacgtccctagctcaaagtagtataaatatgctccatcaactgtaaatatttcaacgcgactgtaaatacatatcttgaaatacactctctgatcgatttaacttaatttgatctcaaatttatgcttacgttgattacaccatgatccagatttcgcgtcagatgtctgtcgatagagaaagcattttaacgtcaagttgttaaatctttttgttaaatggtaatttgtcgttaattctagaaaaattaataggcagaccacatctttcgacaaataagtataacgcgcatatttactacatctacaaccatatatggtctttcccgaacacatcttttttcgtgaacgccatatatggtcttctctacacaagctcgaaaattccaaatacatcaaatattccgatcatatcctatagattgtgggaaggcacataaatttacgctaaatgtgcacgaatgtgtaatgattgtatatattagtttgtatgatatcacctaaacaagattttacgaaaggtacattgtcccctgtttaattcagaattcacttgactgcgtgtatagaataaattaacctttcgtcatcgataagcttaattactctgtaacccaagcatgtagtattatatagggcagaaactttcctaggattggacaagaaaacactcagcaagtcattagcaagttcccggtaattaattatatcttaacactagtacaatttaagctatatatgattgaagaagacatgtgcaatttactagaggatcaaggaagcatcaatcgaccaaaagttgttgaacacgcacagcgacaagtccacaagtgaagtactagtaattattcttaactaattggggttaatagagacctgcagctacatactaattatttaactgaccagtacgaaatagcttgagcatatactgatcagattattttttaattagtattatattgtctaaaaaaacacatcagaatatacaagacttatgtaacaatcaccacatcaccactgcatttggaaagacgcaagaacagggaatttttcaggaaaacagcgtgttttctccttgagatttcctgtggagattctgtcccaaatagtgcctatatatatgacagaatgacacatcaaccgattgagacttcttctctcttataattgaaatgaaattaggagaaaaaaattaagtttgattgtgacaactgacaaatccactaattaatttgaatctttaatttcatctatatgcatgtatccctcacgaaaaagaaaccatccaacatatatcatcatcctccagagcacattggttttatgaggaaagagaaaaacacatccaaagttaatctcttatgtttccccttaaagatataatgaaagtacaacttcttgtctctgcattaacgagagaatgcacacaatcattacgctgccatgatctaataaagatgccaattgccaaaataaattagatcacatctaaagtttctctagttagcaaagtgttttttttccctggattgattattatttttgttcttccatgtatatatatatctcacttgtgtaggagagacatatattatatgccctaagattatatcctgagtacataatcacaaatgcttgctttgtccagaatatttgttggattgatgccctagaattgataggttttggcctatgttctatctaattaatttatgccacttttctcaccctaaaaaaatgttctaattaatttgatttgatatacaggatcgaagctaggtgatcttagctagtctatatagaaaacgcaaagttacacatttagaatctcatttatttaaagagtagtgttcctatatcatggtatatgtcattgtagcttggtagctaaattaattgcaatggtgtcatgaacttgacacaacataatccataattcaaggatgcatgcatgcctctaccatgcatgcatctagctaaaagctaacatggatcactaactagttgtaaacttgtaattaattaggccccattaatctccatctaggttaacacatttgctaggagagatgcaagctaatgataggacatggatgactgcagagagatgtgagagatagcattagctaggtcctacattattagataagcacaaagatatatattttatgccagggctagctttgcatgccatcatacacaagcgcacacacacacacttgttaatcctcctaatgatcaaatcaagctctcacacaagctattatacaaaaggccaccattgtttccttctgatgcttactttgcatatcacccattaaccaattacttaattacttaattgtttctcctcccatggcccccacatgtaatacacacaacctgccactctcatccctaacctgccaacctatgtgtataaattcccagctccttccctcccatctgagaagaaagcagcagcagcagagaattcatcacccagcaagatcagtcaggatcagctagctaataagctagctacaagcttgattagtcacaaaaccacaagacaattagctagaagtatatactgagatgggtgaggaggagaagatcatggcagctgggaagaagatggtgagagtgagggagttcatcatggagaaggacttaccggcggtggaggagctcgagcgcctctgccaggccggcctctccggcgacaacggcgccggcggcggcggcggcaagaagaagaagagaggcatgtcgctctacgccgagcagatcggcgacccgttcgcccgggttcgccatgctccggaccacgtcatcctggtaattagctactccatccgttccaaaatataaaaatttaggaccagatgaaatatgtcctagtacagcgaatctcgacaggcagcctgacactgtgttgttgcatgcactgtgttaatcttacagtgatgttcttgatgtgattagttgcttgggcgtgcgtaattaatgcgctgtcattggctgctttgatctgtgtataggtcgctgagtgtggagacgaggtcgtgggagtgatcaaggcgtgtgtcaggatggtgaccagaggcagcagcagcagcttgaggaagacgaagacgaagacgaacaagtttgtcaaggcggcgtgtcttcttggcctcagggtgtcgccgtctcacaggtgatcgatcatccacgccgccatggacgaccatgcatgcgtgtccaagctaagctttgtagtacgtgccatggcgatggcgatcgagctagctggtgctgacgacgacgaggtgttcggtcttttgcaggaggctcgggatcgcgacggagctggtgcggagagcggaggagtggtgcgcggcgaggggcgcggcgtacgcgaccatggcgacgacggcgtcgaacgcggcgtcgctcgcgctgttccagggccggttcaagtacgcgctgttccggaagccgcggttcctcggccaccccgtgcaccggcaccgggcgcgcgtcccgcgcgcgcaccgcgtgctgcagctgccgccgccgctcgccgcggcggcctacgccgcgctgctccccgcggcggcggcggcgcccgagttcgtccccgccgacctcccggcgctcctcgcgcacaagctcacccgcggcacgtacctcgccgtcgagcggagccccggcgccggcgcgccgtcgtcgtttgcggtgctcagcgtgtacgacgccacgcgctccctcagcttccgcgtcggcggcgcgccgccgctgctccgcgcgtcgctcgccgcggcgcgcgcgctcgaccgccgcgcgccgtggctgcgcgtcccttccgtccccgacgtcttccgccccttcggcgcctacctcctctacggcctccacatgtccggcccggcgggcgccgcgctcctccgcacgctctgccgccacgcccacaacgtggcgcgcaacaacccggcgtgcgccgtcgtcgccgccgacgtcgcgcccgacgacccggccgccgccgccgtgccgcactggcgacgcttctcatgcgacgaggacgtctggtgcatcaagaaaatcacgtccgtcgccgccaacggcaatgccgcccccgccgccggcgacgacgacgactggacgacggcgccgccgtcgtccgtcctgttcgtggaccctcgggaattctgaaactccattcagttttggtattctgacgacgttgtaaatacatcaccatacatgacgtgtgtgagctgcaagctttgcaaatggatgcaaaaaaaaaaaaagaaattcattgcaaatttgcagcttggaatatagataaaaaaaaattacaccccaatagtgtagtaagttcaattagcacttgcctcctactaagtctaaaccctgaagattccatcatcaaaatggaccagattaactgtgtaacaagagaaaaataacacatgtgcaaatcacagattcagacagcctgtgcttgggtcctctcttgctgtcatcaatcagaaaattcaaagggaacaattacatctgaagaattctctggtctgaaaaaaaaaaagaactatcattgactgaatgagtaaagtttcagaaagcaaaggataataaaaaatgggtgtgattacttatattgtagcaattttttcatcttgcacaagatcacatatgatatattaaattcatacatcccaggatttttttttaaaaaaaaagaaactttcagacatcaatttgatggggccagttaaactaagtccatagaagaaaaatatccattttaggatcacatcgtaccaaccccatatggcatgaaaaggaactcaaattctaatcagtaggccctggacaaggccctcataaacctaatcataacttggattttcttcagacaataataccagatacaaacaacatacaaacaaaagaacaaataattatgttcataacctagtgtcctcctatttttcctctaaaacctggataagatcataagaagcaaagtcatgaccactgacagattgattcctctagcatcgtccacagagtgtagccaagaatagcaaagaaaaacaagagatagtttggaggaaatgaaataacctgtatgaaagatactagataacaatatgatgtttaaatggttaggaatacgatatcaaacaagcgaggaaatgcgatggtctaaggggaactacatgacatttttttttcaccgggagtaagggagtattagtagcgacaaaaggacataagggagtattagtagagacaaaaggacaagtttaaaagtcaacattgaggtgcatataaatcattttcttagtgacatcagaacagaataaaagatattctgtttgtatcaagacaaaagtgcaattgtttatgtcagatgtcatgtaaaatttattcaaactattcaaagaacattctttgatattttttggtctaaagaactaacataaataggaggctacaaattaaagacacaaaagcatatttgttgttggctctcatatgcagactgagaataacttatgactaggtcctgacaccatacctaagcctaatgaagaccgcaatgtggacatggaatacgcataatcattccaatctgcctgcatgaaactatgcgctgaattctagatttctaaaaactacaatttgccagagataaaaaaaaacgtccaatcagctagtgatccacttgagcaaagaagaaaagatcttattagaaaagttagacaaaaaagaagatgcaacaacaataccctttaattggccttgctggtgcatgaggaatgtactgaagttaagaaagcaaatgactaggaaaaatagtagatttgctggaaagaatcaggaaaatgagaaggtgccaaggtggcaccaagtcatcattaaagaaatattatacagtggatgataatgtttagtcccaagacattgtaaattatgcccaaacagataaataaactattttctgaaacagtaatttactagagaagactactcacaataatgcaaaaatatataccactggtactcaaactcaccaccaaaacaactcccctcctgtcacatcccacttcatctgtcttgacacaacgtggagcgatgaaattagatcagtggcagtcaacattaagaaaagaatgaaaatagttcagtggcagtcaacattaggaaaaggataaattatttcataaaccacctacgctgtcaaaagcaatgcctgtcaactaagtttggaatgcctcatatctagtcctgtccagtcagcattcaacatgtttaaaccaagttgaacagtaaacaagaagcacatttgatgctgatattcatatcgcagggcatttaacgacaatataagtctccatcaggaggcaggacgatagtccacatgagctaacctctaatcaactgtgtgctttagctatgagatatggaacaaaagtaaccggaggactttccagcacaaggagttgccggcgctaactctgctagccaagataaaggaggaagaaaaacatgggggttggcgggcggaaaaaatctcgccgcctggttgacaatgtaactgcctatagttagggccacggccctgttttttttttcctgtaccttatcctttttgtacagttttcgtctcctctattcaatgaaattggcagcctcgtcgattcgttcaaaaaaaataaataatcaactgtgtgcaattttcatttgcatttatattcatcagttagaccagggcaggaaggccacccatggaatcacatgagaaaaccacatgagagaagtcacctctacgagaggtgaaatcttggagcagagaggaggggaaacggacctggatgctgggcttggcattgccggtggcgtcgctgctctcctctccaccctccgggctcctctccggcggcggcgtcttccgcagcgaagacctgcatccccggtgcgatccaagcttcgaccgccgccgctgccatggccgttgctggtcggagaagaaggggggagacatggaggcccaggcccaacaagagtacggcccaatttaaggaggaagaaaaaactttttggcatttcaatttgctgtccacatcatgcaggaggatggaatggataattggatatgcatatcaaatcagaagcaaattcaattgccttgtacacaactcagatgaacaagttgaaatatttattcaagaaaaacttagttgatgttaagggaagcttgaacagaaatgctactaccaagaagtagcacaaaactatggtgatataataacaggagttacagattgttacagaaactggagttgcagcatctttgctgggaattcaccaggccctcagtatcagccaccacagttaggtaggatgaaccttttgggttgcagatcattgccatcaatctatgggcctgtttggcacagctccagctccagctctacccctcctggagctggagctcagccaaacagtttcagctccaccaaaactgggagtggagctgggtggagctctctcacaaaatgaactagagttgtggagctgggtttaggcagctccacaactccactccagacccaactcttggagctaaatttaggagttagagctgtaccaaacaggccctatatgtctcagctccgaaaacggagatgaagaaagatccaagatacagtaccggaaattctacagcaagtcaccgctgttagctgttcttgatggatttcctcatgccacattcaataagtctatttatatgtgcttacataattgtgttcatcatatttgcagctgaaaatattttggcgaatcagtcaagacggcggagaagatactcaacttcaacatccttcgtcaaaggcattacccacagatcatatagcttagatagcacttcaggattaactttgcactcactgtcacctgcattgccttcttgcttgtcagcattgtcctccaaagtgacattctgaccaaatatcctggccttcttctctactctccttttcaccttctcttcaaccgccttgaatgttagcagattcatcagagccttggtatcctgttgaaaagagagggatataataaattaaagatcagcttcaaaaaataaattaaagatttaaaggcccaatgctagcagcctagcaggcagttcctaccaagaaatggagtgtatgcaggagttaaacatctaacacatgaaactaagtagaagctagataagaatgaagctaatcagaataagaccaaggagtattcacaatttctataaatcaaccgtttattgcaagatgtttaagaaaatttggtgtagtgagtatgagatgttaactaaaaacaacctttgcacggattagtggactataatcttgggaagcatctttgaacttcacctcagcaacatatttaccaatatgaattcttcttgacagggcctacaaagaaatgatcaatacatttcacagatatacactgattggaaacaatttaccattaatttgcaataatttgtgcaaattttgctttcgcgtgctgaaagattgaaagaacatatcctagtagcaactagatttatgttttttttaaagaacgaccaaattgatggaatatctaaaagaaacaataaacacagaacatgtaccttcagacatgcaaaatctaatgcaactgtttctgcatagttaccatcatctccatccacagtgaatagtggaagcaactcgttgaaatacatcttccatattgcatcattcacactgactgatgatgcaaaagagtgcaaaacctaacaacaaagcaataaaaactcagaacctcaacaatcattagtcatcagttcattgtaactaatattgtaaagcttagtatttacctttgggtaatctttggtaggaaatagaggtgaagggagatcttggggaaagaatggaacatcttctggcttttggtattgtccggcctatcagatttcacagatgtaattagattctgtagagggatgcttggaaatggtaatatgctaatatctgactgtcaacatagctataccaatgctgtattttatgttgattgattttgacagttttaataggatgctggataagatatacaagttgaaaaatagcataacaaaatttcccatttagtaaagtacaagaaaaataatagtaaatcatttatgttttctattattaataggggatggtacggttcaaactttttttctccatcgtcactatttttcccttctgatcactttcacttgttgaatgatccgtaaatggaagtgcctttaaaacacatgatttacctacacatgtagcatagccattcttttgttaatataaatctcatccgatactgtgtgtccgttcgaggtactcaaaatgaattcgtcaagccaacataagccgcaatgccgcatgattaccagaatggacatatcagcatcttaccctccgatgctatctttcaattcatcatggtacagtggagaccaaggtagataaactactgccaaaaaaacaatgtggtaacgaaatacaagcctagcctgtaagatctgtgtgactgaatttcacatacgaattcctcagccatgagtttactaatcactaaggtgactgaatagaaagattggcctcagaaatttcaccaggcaaaaaaaaatcttcctgtacaagttcatcatggctatgctacactacaacatggtataaaaaggatcgattttggtaaagaaaacgtaaggggatctagttgggcaggatactgaatcatgaatcaatggggagtcaagactcaagaacaacgagaggtggcgggcttaccttggcgtgcagaacctcggcttcccggacgaagaactcggcgagggatcggccgccggcggcggcggcggccgcgtatgccggcgcgttgcgcgggcgcctggcgcgctcgatgagggcgaagacgatggagtcctcctcccgcaccagcgcgtcgcgcaccgccgccaggctcagctccgcctcgcccatcgatgatctctcgatccgccctgtgatgactgatgagctcgcgagctaagggaaagctgctgctgctgatcctccacagctccactctgctttgccagtggtgccactctcctaggggcctctttggcttttttcgtattaagccaaaacgacttattaaagaataaaaataaatttataggtaaaacttttatatatgtgttcttggtgacttaaaagtcaatgctgaaaaagaaattacgttaaaaatatctcaaaatcaatgtcaaaattaagtttaaaaatttaaatttttgctttttctttggctgaataggtcatccgatgggagccctagtgtgttgttcacatggcagcgatttttttatttatttgttcaaactttctaataattatttatcatctcttattataaagttgtaacccactaactactaaatattaatatgcaaagatgtcatatcactatccactaacaatcattaaatttaaacatcatgcaaacatgctatattatctataattttataatttattaaatttttagagctttcaaaatgcaagcgtgttaaatcatcatcccacataattcatattatatttcaatatatatcttcattatttttataatatgctatgtacctatatagttcatcctctcttagttaatgttatttcttttttctctgattaagtcatatatcatatcaattatttttagtgcttaaaagattaatctatggtccaacttatctctcattttcttctctcattaatccatatcaccttaattaattttagcctttagatgattaatatactgtccaaactatctcaacatttttctactttcataaaatcatagcatcttacttttacatttgaattatcattctatatattatttaaacttaaattatcataaaccatgttaacttacataatcttatgttgtttagctatttgacacattatttttacttattattatccccgcagcaacgcgcggggtttcaactagtttaaaaaacaaattcccccaaaatacttatttttaaatctgactttttttttcacactgaagtagtcagcataaaactgacacgtgttattttgccacgtcaggatagtgtggcaaaatgttcatatttttaaaaataaaatttgatatgtttatttttaatatttaaaaggtaaaataaattcgggaaagaaaaaaatgaggcacttttctggtctttgccactagtactcaccaaagtgaccaaagtatatatagtaaaccaaaaaagccaaccaacaaacatctggatgatgtttccttcactgtcagcgccaagcactgagaatttgagtctgagacagcactccaaccaaccaaatcattctccgccaaatcaaaggtgcacttgcggggacctgggattaggggggcttgtggattgcatccattctcaaccttaacaacaaaaaggaaaaattggtaatggcaaagtagtaatgggtccatttggtttgatgtcaaaaatattggcaaggaaccaaactttgccattgtacttcttggggtcttcccatcctataggatttatttggcaaagcttctcctttagcttcatctctcctctagctaaaactgaaccaaacaattttaatttcatctaaaagcgaagtggaacaagctagagtaatcttaaaataaactagaatgatagagtagagtttggaccactccactgctccattctaaactccgcccctaaaattatttttaaaattttagggctaccaacactcataatgtaaatggaagtagttctttttacgtaaagttaaagggacatccatccctgttaggtaggacccactctcatgggtgcacgtgtcagagacacgtatccctctaacttgcatcgatgagtgtgtatatatttactataatcatagtacttgctcaggaatagatgaaaatgccttgaaaagatgaactgagtaacagtctattggtcccgttaataattggaatcagggtgcacgcatgtagaaagcaatgtttcacttggggccaataaggagctaggccaatttgttaagcaaataatgaattgtcgttaaaagatttggtaattagtttctctccgttccaaaacacatataatgttattctagtactttgcacatgtcaaaaggtttagtttggtttaactcgatcgcgttgctatcaaatctttgaagtgtccatacttgaatagttttttgcattaccagaacttggtagagtgtgttagttggatgtatcaccaaattgagttgattcgacattattccatttgctaagcgcaaaagtttggtatgattgctatctgctctactcaaataatccttacctacctactaatatttcctacttccccgtcaagagaaaaagcctaacttctaaccataaatctggacataacctatgttcatatttgtaggcagaacttttttttttgggaatagggtatatgtagcaaaccaaatcaatcttttttattattgagtcacttatcactctctgatgatcaatcgcgggcaaaagaaaaaaaatgttagggagataactaggaataaaggtcaaaatctaaaagaaatatctgctccgctcccccttcaaatatgtctgaaacacggatatagtatagttgtatagaaatctgatggatatgaatgcggatgcaaatagaatggtgtgaataggaatacgaatatagtatctctagatccagtgatccagattattagatatttctaccgggttatccgataggccatatgccggataatttaaaattgtcaacccacgtaaccgctagatctggttacatacaacacgagccatcacatcatttatcaattaacctagactccttagtctgaggctcttatcgtctcatctcacacttgtgtagctacgtttttatattatggagactatgtattcatgttatttaacatttaagtatatagttattacgatatattatccattaattaatatagtgttgcctattgtattgctaaattaatgttatattgattatatatacatgtaacatccaacaattataatctgtttttgaactgggtcttcaccgactccgacatccgaaagaaaccgctccacgtttgtagcttgaagtatgatagtctaaccatagtgttatgcgaagatcatgcactgcctaaccatgttgtgctcctcgagtagaagggactacgcgccgttaaaaaaaatcataatgttgtagttatattttgctatttgactggtatgatgtacttcctccgtaaaaaaaagagagagaatctattttataccactgagttttttcgagttcaacgatttgccatcaatattgtcgttttctataatataccgttgactttatcaattgttttacaatacactattgggctaggccttcttttgaaaaatacccaaaatacccttatggacatacagtgttaacaattgatttacctaatttgttgtttcaaaaaatatgaaaacttttatgtggcctccttacacaacatggaaatttgtatagaagtttcaacttttttattctattttttataaaagatataacttatttgttatatgctatataaaatacctttttattgttgtttttaatataaatcatctttcataacactacataagatatttttgtgctattatgtcttgtataagcaaattctctctcatataccccataaaaatattttttttctaaaaaataaatataaaaaaaaaacttaaaacttgtatataaacttccatattgtgtaaggaggccacataaaatttttatatttttttgaaactttttatgagataaatcaattgttaatcttatatctctctaagggtatttcgggtatttttgaaaagaaggtccagcccaacaatgtattgtggaccaattgataaagtcgtcagtatattatagaaagagacaatgccgatgacaaattgttgaactcgaacaaactcagtggtatagaatagattttctctaaaaaaaaaacctacattaaaatcagatgtggcagtacaacattctgaaattttacatttcaatataggttaggtctttttgaatgagaagattataagcgtgttttaaggatggagagtatgctaatctggacatagtttatatctaagttcgtagttaaaagttttttttgagagtgtagctactaagtactagtagcatgcaattaattaatttgttgggcatggcccaacacacacacacacacacaaaaagggcttgcttggttctgagccaatttttgccctaccaaaattttggtagtactaaaatgttggcaaatttcgatactaccaaattgagtaggagtagtattcaatttaaactattgtgggtaaatttggtagcaaaccaaacatgcacttgctattattgaagttaacaaaattttagtagggtaataaattggtatcaaaccaaacaagctctaaagtcaaacttttacttgtatatcatgtagaaaaggacgagaggttaaaaacaattgcttacgggcatgcaaatagtgtactactccctccagttttattttaattgacgctttggacaatgacacgctctacaaaatatacctttgaccctatttttctattataatatatacaataaataaatacttgtttatttttattatagtgttttgaaagacaaatctatatatgtttttctagtttctttaaactaaatatttttaaagttattgatggtcaacgttataaaagtttaacctcaacattgtccaaaacgtcaattattatagaaccagagggagtaaatcagtactaacatgcaattaattagtgcattgaaatttggcaaacacaaaagtcagccacctagcaccagcaatcggatgtcattagaaaaagttaattggatccatgccactataataagaggttgaaacaatggcgtccacgtgttgaatgttgatagtcttactaaaatttggtactgcatagtgtggttgaaatgtgtaggttgtacttccttagttgtccgactttttttagtcaaactttttacgtttgaccaaattgttaaaaaatatactagcatttgcaatacaaaacaaacatattatcaacacatatttaatattaaatttagtgaaaataatttattgttgtaaatattgctattttttttataaacttagtaaaacctaaaaaactttgactatttaggttaccatctttgtcaagtttttataagagagattttagaattactgaactttgataatgaagacagttcttataacgtttaaattgtcaccttgttaatatttcataaagccaaaatagggttgagtttggcaacaaattgatcagctcctaattaccattccgtataaccttacatttgatgtgcagcgtcagatatgcaaatggtaagtattactacctccttttcataatataaatatacttttgtggtttttaaatatatttggacatttcattaaaaatgcatagaaatatttgtactatttttttcttttcagattggtagtatgggatagctatattttaaaattattaggggaatatttggggacgaagtttcagaactagtagcatgcaattaataaactttttgaaattgtgcaaatgcagaagtcacatgtacctgctgcattcgtctgtcaagtagagaaggatgagaggctgaaacaacagcgccgacgtgtcgtctctaattaccactcgtaaattttaccgatctgatgatgcggaagtgctaatcggggatcgatcgcttgggcacagggctagcgatcaatccccctccctcctaaacctgattttcttttttggcaccacattacttttctattttagtaaatttatgcacctaaaatttatacacctcaagtttatacatctaaaatttagagaccaaaagtttatatatccgattcaaatttgaatttgaattcaaatattttttttatatatagtatttctatacatctaaagtttatagatccaaagtttataagtcaaaagtttacatgcccgattcaaatttgaatttgaattatatcgggattcaaatttgaatttgaattcaaatattttctatatatagtatttctatgcacctaaagtttatacacctaaagtttatagatccaaagtttataagtcaaaagtttacatacccgattcaaatttgaatttgaattatattcgttcaaatttgaatttgaattcaaatattttctatatatagtatttctatacatctaaagtttataaactttagtttatagacccaaagtttataagtcaaaagtttacatgcccgattcaaatttgaatttaaattcaaatattagtttatagacccaaagtttataggtaaaaagtttacatacctgtttcaaatttaaatttgaatttgaattcaaatattagtttatagacccaaagtttataagtaaaaagtttacatacccatttcaaatttgaattttaattcaaatttgtatagtgtagtagtaagagaagaaggggatgtaaagtagtaagggggaggggtgggtgatcgcttgggaggggagggagcgatcacccgcccattaggagtacccgatctgatgcgtatattagagttctgtgacgctaatgcatactcctcggtcctaaaataaaccaatttttaagatttaaaattattttaaaataaatcaatttatacctttttacctaccattggttggcaaatcaagaattgtcttttcaatgcccctcaccaaccccctcatcaatataagtttactattaattaagggcattttggtcatttgtctctttttttttcttgtatctatcttgggaagtttgtgggagtatgcaaggatattattttaacttaatcaaatgaccacgtgctctagtattttaaataattactcgtagtaatatctgcggccattattaatttgttggagctgtggaaagggacgaaattgcaacatctagcgtgaagcaaacgagtagcaaagcataatagttgttggcattatattgagcacatgacccttggctgccaaattcaatttataattctactatagcaattgattaacacgctaaataagcaagtactactactacaacaatcctaaaatataacctctctttatgttttctatctagctatataaaaacattgattcttctaatttcttttaatatataattattgttgatactgaataattgaattagccatttccaaacagatgctactctttcataaaatacactcccttccttctaaacagattatgacggatccttgtgataattttgaacggagaaatatataagatacaaattagtactacgaatgtagacataccccttataaatatcagtttatccagattcatgtagataggtgatgcctaatccaatattgtttgctataatataatattatgatactaccgaggaagtactgttttggcccgtttccttccgttttcatgctggtctcgagtgagagtcggtcggtcagaattcacactctgaaacacacgccggtcgccgtcgtcaacgttggtcttgggcacctcgcgtttcacacttttcttctgtaccatttcgccgagctttaccccgcggctcgtatataaatcctctcgatctgacgcggattctgctcattccaaatcgaatccaccaacatcccccccccccccggcattgatctcgccttcatcctcgcgcgattcttgcgaggaattcgattcccggcgatggccgccgccgtcgtctgcgtcaccggcgccggcgggttcatcgggtcgtggatcgtcaagctcctcctcgcccgcggctacgccgtccgcggcacatcccgccgcgccggtatgggtttttttctttttgattctccgccgcctcgccgtcgccggcggcggcgtggattgggaggtgacgagctcttggattcttgcgcagatgacccgaagaacgcgcacctgtgggcgctcgacggcgcggcagagcggctgacgatggtgagcgtcgacctgctcgaccgtggcagcctccgcgccgccttcgccggctgccacggcgtcatccacaccgcctcgccgatgcacgacgacccggtaaaccaccaatcccccccctctctctctcccccaaagaaatggtgacgtcatggtggtggcgcaggaggagatcatcgagccggtgatcaccgggacgctgaacgtggtggaggtggccgccgacgccggcgtgcggcgggtggtgctctcctccaccatcggcaccatgtacatggaccctcgccgcgaccccgactcccccctcgacgactccttctggagcgatctcgactactgcaagaacaccaaggtctgcaccccaacgctacattttttatcccctttctctcgcaatgaatacatttatttttttcaatccccatttcttgcaaagatttatttattttttgttaatccccaatacctgcaaagatgggattttttttttttttttgcaatccccatacttccattgattgattttttttttcaatccccatttttttctctcatacaagttgtgcaatggaatgaaatggcagaagactctgaatttttattttcaatccccattcctcgcaaagattggggttttctaatccccatttcttgcattgcaaagattgagatttggatactttaaatccccatttctcgatcacctgcgaatcaacaaatgtgcaaattgcgatgatggaatggcagaattggtattgctacgcgaagacgatagcggagaggaaggcgtgggaggtggcgaggggtcggggggtggacatggcggtggtgatcccggtggtggtgctcggcgagctgctgcagccagggatgaacaccagcaccaagcacattctcaagtacctcaccggcgaggccaagacgtacgtcaacgagtcccacgcctacgtgcacgtcgtggacgccgccgaggcccacgtcagggtgctggaggcgccgggggccggcggacgccggtacatctgcgccgagcgcaccctgcaccgcggcgagctctgccggatcctcgccggcctcttcccggagtatccgatccctacaaggtacttttgttttctttgataatggattaaaccggcctctacatccaaactggtactaacagcaattctgattgatctttctgtttcataccaaggctgtattcataaggaattttgtgattgttgatcaattttttttagctatgttcggttgctcgatttttagcaattgcagaatgtcaacttgtcaagtagccaaatatgcactcatgctgacagctatgtactaccaaaggcagtagggactagagagtttgagaactagtatttcccatggtttgcaatttgctttgtcagaaagccagtagtcaactaatctggattgcacaattaggatgtgtttggttgggtgtatgatagttttccttctatctagaaaaaagaaaagggaagacatgggtctttctccaaaactctacctctgcattatatgatagtattctgaaattcttaatatcgaaactgaagaactactgcactagtgacttgccatgaggtacttgaatctcaggttagtcagtggcttgaagatcattttagaatgccatggttagtactttggataactcaaactatgaatcgcagtggaaattattctttccttttactgtgcgcctgtgcgtaataaagccctcctatatttccttgtgatggcaatttattgttgtggacaaaatagaaagtggtatatgaattctgaagacacaacaatagctttcctttgcttgaaagacaataacacgattgttttcaagatataacatatgtgatgtctgaactccgcaattccttgtagattactaaacaatgtttttatacttagtggaatacattctggttgatgcccaatctaatctgttacatgttacttctacaggtgcagggatgagataaatccaccaaagaagggctacaagttcacaaaccaacctctgaaggatctaggcatcaagttcacacctgtgcatgaatacctgtatgaagcagtgaagtccctggaagacaaaggattcatcaagaagacctccaataccaaggtaaaaatccaatcgcttatcgattaacttcttctacatcttaagcaaaaggaaaaggtgaaattggaaaaaaacaaccatatgatagcatagatactcatatttatgatcattagcagaatgaggaaggaacattctgaaaaatccatatcaaatataaatagctggatgaaacaactttttttttccgattctgacaaaaatgatcacatacatatccctgatggtatcttgattattgcaggagcttcacaggcaaagttctccccctcaaaattcacccgcgagcatgctgatgtcgaagctttgataggtttctgaagaaatcccttttgaccgacggcttatctcagagtttacatagctcactaatttgattcagttcgatatctctggcaaattgccaatttctgggagttcatcctaaaagcagataataagaacaaccaatgtgtatatcatcagggatatgagttgaattattaaaggatgcttcagataaggttatgtggaaaaacttggtatacattgttgatagatatatacaacatatacactattgtgatcatgaggcaatccttatacatacagaaatcaaaacaaattaaataaaaaagcataactgtacattggaggatacagagaaaagattttgtagagacaggaagaacataaacacgatatctggaggctaacaacatgcatccatctagaactcgtgtatactagtataatctgtgcttcgagccttcgatcagttccaatttattcaacagtgtccgtctccagccgcgccaagattgaggccctgttaagatcatagaactttcacattactcaagtatcgtagtaaaatttatgtcttgaattttgcagctgcgtataatctgaaagagagaacgatgtaatgtgatgtactaatgtcgatgaagaccgttgtcacacatatatataccgttatatcccaacactttgacaacacagtttttttttatgtcacatggaaaatgatagttctaaatcctgctagattaattggtcaacaaaatactcaccactgaatttttaacatattttacttaattaaaacgacaatgatcagaagtgacagtggtgaccgtagcaatgcctacaataatatgacagctaaaaagtaacaaaataccatcctaaggcatttcaagggggttttttttttaacacaaattaaggttgagttgaaattagggacatactgatgaagtttacttgattcggaaaaataacgtctgatggtgtaaaccaaattatgaatgaaatttaaacgctaaaaatatttatatttgtgaatggagggagggagtatccggcccattatcatccacccaaaaaaaaccaccccttacattttaaggcacttttaaaaggagaaaaagttattacaaaatgaaaagaaaaattactattggtgaatcgatagataagggtattaaagtaataaaacttcttagtttgtgaattcgcacgagcagaaagggcacggaaaaataaaggccctgtttggagagcttaagattataagaagcagctggtttggtagccagcttctcagaatctgaaaaaactgggtttctcaactacagcttctcagaatctggaccaaaagctgaactgtttaggggagcttctgactctggaagaagctgcagctgctagaagctacctcaaacaggcccaaagaagcgtggaggagcagaagccaagctcattcccttcgcttcttggacccagagcagctctttgtttcaagtgagcagccagcccccctattaatacggttgcttttttcaccgggttgcttagcttctaaaatccgaaaggttgatcgtgaagggaaatagaaaaaagtattacttttgactcacgctggacaaattttttttctagagggaaaatgaatttgcagtactttttaaggaatgggtattgcgggtttcaagaatggttcctccgcacaaagccaatcccattccttttcacttgtgaccatcttttgcctacctatttaaccccttagaccttagaccttagtaatcccaagtccaagtacaaagctaaaagagcaaaaatcaatttactgtggaatagggtatgaaccgtagaaattactcttcgtcctaaaatataacaatttttagcacttaggatttgtctcaaaatctaacaatttctccactaatattcccttcctaaccaatcacaaccctccattcactttttccacatacctcgacatttctcaaccaatcagaacatctccttatttaattttacctactttcttaataatcgtttcttatattctgggacggatgttgtaagttattcttattttaggacaaagggactagctgtgtatagcaacttaatattggattagacacatcttacttcaataaatttagacagatgatataaaatgtatataatccagtcatatattgctatattttaggacaaaggataaaaatgaaaatgtatgctggtatggtactattacctctattctgaactataggatgaagtagatatgaattacctgtgtcctaaaatatatagtttttttttagaatttaggatgttattccatactactcgtacgaatctagatgtaaattgcaatttaagaaatgcctaattataaagtgatctacccgtgcacctacagctggatatccatcatgcattgaaggatccattgatgcagcatggctcactttcttaggtgattcagtccgtatactctttgactgtgtcgactaccaaataccaaattgtattttgatattaaatttaatgttaacaggaacatatatactccatagtaagtatctttgagcctaaaagagattcaacaatctaggtatatatatgcccaatatgtgaaaaatctgaattctagtaaaatgatagacctagaggcatcttcatctagatagatttctgccaatatgtgaaaaatctgaattctagtaaaatgatagacctagaggcatcttcatctagatagatttcagaaagatctgaattccggtccacccaaccaacattttgcatccttgcagtaagaaacaagggtaaaactgaaatgttgctaaggtatttagggtctgtttggggagcttaagattctaagaagcggctggttggtagctagcttctgagattatgtaaaagatgggtttcccagcttctagtttatactttctagttcattttctggattttacaactacaacttctaacttctaattctagagaagctgcagtaactagaagctctctccaacagacccttaattactaccaacgaagctcacacatagtaactactctttcatctcaggtcatcacatctcttattattttgtaactttacttacttcttatttttaactaatcatatcctcatttaattttaatttatttctaaatctctattaagaaaaaataagattggttatattttaagaaaaaaataagaaaataatctctcacacaggaaggcgttcatgttggacaggtttgtgagaactggtagagtgatatgtacgtactgtcgcgtcacttcattgcgaccaattcgcggaacaggtgatgagccaagcaaaatgcttcaactatacagactagagtctgaacttttgttttattactttttggaaaaggctatatgagtggcttgctttttctcgtgaagaaaaaaatactatctataactattctttttctaattactaagaaatatgatcaaaactagtcgtgatatataaccagaaagttcttcgtttgtcccagcttctcctattgtttatccagattcagcggcgagtttatacaattatacctaaactagagaaaatgttcgtgcgttgtaacgggtgaaggttattttgatcttattattattattattatattgtttacttaagataaatttcgttgtgttaaattcttttggatatatattttattagaaaatcatgagctataattaggtgtccgatcgtctcaagttagtatgtgagtttttaaagagatttcttatacgatttcttctgtatttctaaaaccgaacgaacttaaaaaccgactcaaatacggatttgtatttccaaaagcgaacggacttaaaactcatatacggatgatgtaccaaaatactagcaaaaacatctttaattttttataataatagagattaagaaaccatatgcaactagtactcttggactatgtgtcattctttaatttcatcagaactaatagaaacggtttgcatgtctacacttgagctctttctctacaaaattattttgatataaaattaatggctaaagttccaaaagtttgatcgaatattgtctcaaaagttaaaaatttgtgaccagaggtagtaattgttctagatcacatgcaaatctatccaatcctacacaaaattcctttttctaagctaggttactcatcaacagatacggtagctagctagcgactgtttgccgtgaaccaggaaacagtaagtttcagttctgatcgtgcaaagctgccatcgataggtaccaacattcaacaggtaggtacaagaattgaaggggagttttatgagcaagtacggacgtgctcttgcaagagcagtgtaccattagagcaggtacaatagcagcagggtataagttagctataaatatattttaaaaaaataaaagagaagagaaagaagggcagcggggctacagatttgtagccagctacagtatggactctaagatgcatgtgtgtatgacaggtggaccagatataaattacatagtatatgtttataagtaactattgtaagaattagctattaaattaactatatatgatttatatatgatttgtagccagcacttaactatactattaatcataagagatttcttaacaaattatctatctgattgattcagccaatccaaagtccagtgcaattaaaatgcatgctattcaatagagttggttttacagttgtctgatacgtagtacttgatccctactatgtcactgaaaaatgaatctaggctgtgtttagttccatgctaaaattgaaagtttgactaaaattagaagtttgaagaaaaatgttgaagtttacgtatatagaaaagttttaatgtgatagaaaagttggaaattcgaagaaaaagttgggaactaaacaaggtgtaggattggatgtgacgcatcctatcgctacgaatttggatagatgtatatccagattcgtagtaatagtatgtgtcacatccagtattatgctgattttttatgattttttatgggacaggggagtatgttccacgttacattgttgtattgcaactgatagccattttgtctgatatatcgaggagaaacactcaggggtcttccggcttcacaagatgttgggttagaggttcgaggttacatctcttctatttatttgatatcaggtctttctctaatattcacattttctgatatcacttcacattttctgatatcacgaggcttttacgggatagaaaatgctgataattttgacgtgaacgaggggaaataactctggggagttttgaacttcaatctcctttcttttctcttttttttttcatattccaaccattgcccttaaaatgggaaggaaactttaaaagtagttcatctaggaatgaaagacgctcctctcgctccaaaacaataataataccgcctgtttattaacttatcggataagtgggacacgatagaaaataaattaacaggttgtttatgttttctctaaataattaatctcactcatgactcacgtatacaatcttcttataaaaactgtagtgaactagttgattagattccttacggtaaaacttatagacccgagtttacgtctctaatttcttacagattctctatagctaattactctttcagttagtgatgacgtgtccattgacagtgaagctctatgatcaatcttaagatatgttagcatactttcttggagtgtttatataagtaggatgtgagtttgatgtctattggcataagtgtttacgtctacgtttatactgtattttggaaaaattatagtttaaatgtggataccgttctggatatataaatggacctatttgaccactactttatattgcaatatatttaaaaccttataaaatataaaactatagtactattgtgttgaagtatttttttaagacggatttgcatgtattatatccttatatccaaactaaatattatagtgcttaaaagattttttcaaccataaaaaaatgatatcttttcaataaaaaggagataagaactccatccacaataaatattcaatgttaaggacgatatttggtccaattttaaaactttgactcttaatttcttcaatgcttagttcaaaaataagaaaaatggcgaaatgaacgtagctcaagtcgttaagtttcttgtagtggaaccagcccacccaattcaaatcctagatttaacacaggtgctcacattcacagctaattattctttcagtgatagacgacgtcgacgtcgacagcaacgtctttggtgacttcgtcaatatcaaatatactggcctaatcttccggatgtgctcacccgtggtgacttcgtcaatcttagatatgtggactcggtcttctggagatgcttataggggtaggatgtgcgtttgtgcatccataggagtaagtgtgcacgcgttatgagcacctgcttttgtaccgtgtttcttaaaaaaatgatatgtatagatttgtcttgaaattatatttagaaatttattctaatataaaattattagttggaggtttatctggttctaaacatcaaatattttttaatttatgatagactagaagaagtaattaccaatttataagacatcaggccattcagtttcaatgtctagtacgtatttggttcatttgccgcttcaccacgagcgagcatgcagctgagtggcagtgggtttataagggtttaacaaaagaatcgcaccgacaactcttgtttatttgtgtgcaccacagacaacaatacaacatgcaaccagaatgtagtatatatacactataaatgtttttttttgagatagcggtaggttaatggccaaagtacgttctggtttgcatgcatttgaaattgtcatctttctgaaaataaattgagcaacatcatgtcgtaaaagaattttccaaggcagatcatagtgaagctaccatttcaattcatagcaaggtacaaaatggtaagagcgatcccattaacacatcatgagtaaaaattataaccaaagccaatattaattattctctgataaaggcattagtaccttaaaaaaaaggtcatttgaatcttaaaaactaggttaccccctctccgccacgcgctgctgcaagagtttactatgataacagtaagtagacaaaatatgtaagatagctagaccacataagcttacataagatttataataattcaaatagtatatagaattatgatttaaatgtaaaagtaagatgatatggctttatgagataaaaaaaggatggaggtaatttggaccatagattaatcatctaagggctaaaaacaactgaggtgatattatgacttaatgagagtaaacaatgaggaagataatttggaccatagaatatcatctaagtgctaaaaacaattaaagcgatatagcttaataagagaaaagagaaataacattaactaagcgaggatgaattgtataggcatataggatattatagaaaatgatggagatatatatatatttcaatattatgtgaattatgtgggatggtgatttaacatgcttgtattttaaagctttaaaatttaataaattatagataatgtagcatgattgcataatgttcaagatataataattgttagtggttgataatgtggtatcttttcatgttaaacattaggaattagtttattgtaactttatagtaaggtaggatacataattgtgatggaatcatggaaatattatagctagtacccatgcatggaaatacgtacggtatagtcgttgatttttacagattaaagtttaaccacaataatttcttataaactatattcttcattgctataaaatcaatattacttgaaaacactttaaaatagtatgaatctatcagtgtaaagtttataaatcaaatatacttgtaattttagtttggttagaaactaaggaaactaaggaaatacttccggatcaacaaataaatgacattttggaaatgtgtgatcaatgcgcttaaactttgacagtcaatttctctttaaatatttcaattcaccttttaaaagtggtatatggttaaatttgccttcaaaacatgttttaaaatattataattttgctatatttttatagggtttatactagtaaccaaaaacaagtggcttggtgaaccatcacttgttgaaccatgttgctttccaaaacgtcacttatttgtgctcataggaagtagtgataagaaaattttaatcaaaagagatgatatagtttctcaaatgcagtgctatatttttcaaagttattttaggaagaggtaaactaaagaacatacctagcgcatgtacacacacacacacaatatatatatatatatatatatatatatatatatatatatatatatatatatatatatatatatatatatatatacgcacacgtgaaaacaaccctcttttaacacgctgaaaaaaaatgaaaaccagtgaaaattcatgttcttactaaattcctactcctactaactactccctttatccacaaatataactttttttatgtgacatatcctagtacagcgaactggacaaactctctatatgtgtcgcatccggacaaaagaccttatatttgtgcacatatggagtagtcactaccaccagatatctgtttcagctttggttttcaaactgctaataaaactagtactatcccataatataaggatttactgcttagaaaagtgctgcggagtataccattttttcccgtagatgactgctgattaaaaatctcaaataagtgtgttctaagatcatatataaaaggccatgtttagatcccctggaaaaatttttcaccatgtcacatcgaatgtttagaaacatgtatggagtattaaatataaacgaaaaaaataactaattacataaatttcgtgtaaattacgagacgaaaatattgtaagcctaattgctccatgatctaacaaagtggtactctacatgctacagtaatcatttgctaatggtggattaattaggcttggcggattctgtagtttgttttgttattagtctatgtttaatacttaagtaaatttcatgaaactacacagttttgtgatccaagttgcagaaaaccaaacacacactttgacacttggcgcttaagtacatatattttaggagtgtagtttcacaaaaccacactatcaatgaatggattcacctgtgatatgacgtggctgttccacttaggatgaggacatggcatccaattatcagccattgcacgaaattaatatgatgccacgttctcatcctaggtggaacaaccacgtcatctaataggtgaatccattcattgatagtgtggtacagaaatatatgtacttaagtgccaagtgtcaaagtgtgtgtggttttctgcaacttggaccacaaaacgtgtagttttgtgaaatttactcttaatacttcaaatgtgtgtccgtatatccgatgtgacatccaaaactttacacccctgatctaaacacaaccaaaatgtttattcttttatgatcataaaatttcaagtttcaatgcaagagcttggcttgtctagtctagtaaagtgatcaggtgtcagattcaggccacattaatcacatttcttttcttttctagtttctgttgctcatagatgtgacttaattaccatatagtatagctggttggcgcgctgttccaataatttgcaggtgtgattttttttattagcttatcattggataaaattataattataaaacttatttttagttatcttagaagttagtttaacataatttatttttaatttgacttctaaatcgttaataacataaatataaaagatatctataataaattatttttagttgcttattcttatatttctgcggcttatcgatcctagctcaaaggatcctttactccctattggtagtaatagttgttatatatatgctttagtccacctagtagcggctactagtgttatgtaaagaaaattctcacaaaacgcaactgtacaggaaaaagatatgtactcgcgcagcccatcttaaaatattttatgtcttactttttattaattagttttaatgtgttcactttttatgtgcctacttatatatgctttcaatcccatacatgtaaactaattatatataaagtcatctatagttcgatcgccgttgtgttaagaaaagtagacaccaaataataaaatagaattaatagaatatttataaaaatattttatccatgattaataagttagtaagttataaaaaataagggggctatatatatccagtgaacttgagtttcctcatcgtagtggtgtaaatatatatgtagttaaccagtgcatacagcaaaatgcatgtccaaattattttcatttcaacacgtacattattttacttctcacacttctttcatccaccgtagaacagtacaagcacatcgtcgaatcaacaaaactattaagtcggcaaagggtaaaactattgcacaactactttcgagctgttcttaagactatatacttctgtgttgttttaacagataaaagtgaattttaccctagttaatattgtccacataaaattagattttgtttagatcattaggaatgtctgctctcatgtatctaatgctatcatatgcaactcctaattatacaagtcccctatgatgagggcaattaaatgcatatccgtatatggatgatctctttatatgaactcgtagaaagtaacataataattcgacatatataattagttcattttccaaaatctacagggccaattctaaaaattattcagagagttttttttggcatttaccatacttatcaaaccttgacagataccatgtttgtgatggatccatcacaaaaggaatggatcacattaactaatttgactaattatcacatgaaaagagggcatgatgcatgcaccaaaataaattagcagaatttctgttaaaaagaatcaccaacatgcatagttaaccacacccaataaaacaaagtaaataatgttgacaaaatcaacgcgctaaaataattacctctcagaatgggactgcacgcgcatgcatgtcaagcacatgaagtgacttttgtaaagcatccatcagcttgaatcatatctcatcccaatccctgcaagagatcggtcaattgacaaggcagcttagcttttttacttctatgtgtcacatttctatccacacaggtgaatctatagcaataaatctccttctaggaagcttattaggtagttaatttactagttgacacaaatcggcaacggggtggatacaatagctatcgtctgtctcttaatgtaaagaaatcagctgatatatggaccttggatatataggttcagttagatcaacagtgcacacaatcaaatgatgaataaagataaatgatcttcctttgtataatcctaataattatctattaacgcccagtgaaaaataattatctattaacaccttagctaaaataccatacagtgctataacaaggaaaattaaagttatccactgaaaccaataacacatcggattgacaacagaagtggaatcaattcacaaatagtaagaagtaaacaccaactagctagtaattagcttgtacaaaggcagataaaccctttcaacaagacatatgcaccgatataattggttagagcacaggagtagtaccttgtggaaattaatggtgtagttgctgccttgctggccattaaacatgaatgatgacctttatctgaaaagagaaggatgaatggtaaatgggttgctcatgtcatgagtagcagcagtgaaggaccacaaagccaagatgcaaaacttcaataaacaagccaaattatcaccttccatcgccacatggtaaagaaaactgaagaaatatgaccaaacccacaggtgaaaaaacagacatgaaggaaacacactcatgcaagctcagctcagtaacacagtaacagatccccgttttacagtggttggggaagacagcaagagacccaacaaagggcaaagagtgtgtgtgtatgtgagggagggagaggggccgggctaacctaagatgcgagccagatctggcaaacgcatagcgaaacaaccttgcatgccaaatatgggtcatctgttagcctcttccatgctccatttttgaccaagcaataacttgatgaaccccaccaccatggccaacaacctgcacaaggagctttagctgaaaaacaagagagcaaagagagaagtgaagagaagagatggggtagaagaagaaagagagagaagatccggttaatcctgttgatgaatcaccacagtgctccagtgtactggcagcatctccatgcttcagctcccaacgcaaggagtagtactaccactgcaagagtaggagaaataagtttggggataaggaaaacacgtagcaaaaccaatcatttatccccagtaccacatagccgggactaaccattatcaccagcatccgtatcactctcctcggtagtagttccggcgacagcacggctgaaaaagattgagaaaaacaggggtaaacatatgcattttacgcacatctaagagataaggaggtgacagggtaaagtgtgggagaaaagacagagtacttcaagcatgcgttctctgtcttcttgtggctgaatttctctgtaccaagcatgaggtttctctctaccaagcataaggggtggtttctagtgcttctttggaggaaaaggctagatcataacaatcaaattgagtaacaccaaatcaaagtaatttagtgattttgtaagcctgctaatagatctggataggagttgagccctgagagaaagagggtgacagaaagaggagtgagcacgcggcgaggacgggatagattttatgccggccatcacgccgtgtgctcactctcttctgtcaatctcatgagagcttctccgtgctagaaatttcttgctcttacttgtcattagagaacctatttagttccgagtcatcgaaatcgagaaatcgagaaaaacgagtaaaaactcaaagaaaaaccaaataaaacctcaagaactcaagagaaagaatcataaacggaagagaggttttcttcttggatccggtgagcggccaccgtactgagcttgaaaggagagctggtgagagaaaaggactctctccctctatctctctctctccctccctctttgtttcttggtgtttgcttcttggagcagaggagatggatgggacgggtgatggtcgtacctcccagggctgaaggtttatgcatagtagtactagttatagaccctgctcctgccttgcagtagtgaagttccaattagcaagagctaacactgtgtgtacagtgagaactcctacttgcattttgattaattacatgtcagattttggaggaggacaaggtaccaatatcccacccaaaaattaaagaaagtttactttgccactgttcatagtacgacaatggtatctccgatgaacttccattaattcgatgaagttagttgatcttagtttatcatgaccattgtttactctctagtctcttccttggacagatctgagaggaggtacatggcaaactttgaagagaggtattaggattttaaaatagccatgctgatttccatatctgaagctttgtaaggtagtttagcccttgcgttaaattcgacgaaacagggcctctagtttagcagtaagtggtagagtggtcaagctgattgcttgaattggccgttgaaagctttgctccaagccgcacatatttgtctggtcatggaaagctcggttggtgaaaatattttatccatgtgcatgatctatttgtattgcgacatatgaatatatatagaccaattaagaacagaaagtcaaatactagtttgatttcactggagcatttcttctccctccagtcacgcaaacatatcggtttagacatgtttatctcaaactttaaaaacattggacatcaatacaattttaattatttagattgaatgtatgaaaaatcacatagtattacatatatatataattatagattttccttgaaaagtacttttatagtattataacttattgagttttcaaatgtttcacaataaatattagctaccaaagtcatttttaggacagcgctgagatgtccagaacatgtttttgtagtagttgattagtagagctagcataagaaggtggtggttatgttgattcaattcaagcatctattctccttaaaatcagatatgctgtgtacacctcatgcacgtttcatttttgaactttggaaaggtacttttgatcaacatttcttctgccaataaattactactgtagtaaattagtttgaccgtttacgctgcagcaataccgtagaagcaaagaatgcgtacctgatcgagttgtcctacaggcagcaagcattaatgatggcctctgacttgtatatatggcttttggccgtctttatatgcgcagaatctgtcctgtgtgtttgattttcgtctccaggctctctatgaccctttgcaaaacagatgacacattccctggcctcctttcccctgacaaatatatagaacttctgataaaatgtcaaattctaaggactattggacatgccataatcaactactaatactatcaaccaattctcttctgtttgggatgtcaccaaaataaatcaaacatgtaataacacaacatgttggccaaatagctaggccgctagctggaatgctgcagctgagcaggagatgttaaagttcagtgacatccccaaggattaaacaaactacccgtggattctctcttttgcatggtttgacgtacttgcagtgctaccaagggtatgaaaacgttgacctgattgcaatcgcaagaaatagaagtgaattaccgacacaaaaacaatatgatgacgggaggcattacgttcctcggttatcaacaatgacatgggccctgtttggttacatggactaattattagcccccatcttttagccctgaattagccccaaaaaatccaaacatatgggctaatttaaggcttaagtgaattagccaccctcaaaacattagctcctccaaggggtgataatggggctaattttctgtggggatcataaaaaagtagccctatctcccttcctctctcctctctctctctactctctctccaccttttagccctatattagcccatagatccaaacatatcatcctaagctaatgtttagcctactaattcaagactaaacattagctcttaaaattagctctgggctaatcttccaaacagggccatggagatgaacatagcaactaaattaaattagcgagatgcacttgataatgtagtgacaagggatgtgtggtttcaaccctgatgtctcatgttcaattcccaacgcgctcataatttcttcttaagaaaatgttggagggatatctttctccgaatctcctttttgcgttcacgtcgactactccacttgtcccccaaacttggggtgtgtttagttcacgcaaaaattgaaagtttggttgaaattggaacgttgtgacggaaaagttggaagtttgtgtgtgtagaaaagttttgatgtgatggaaaagttgaaagtttgtagaaaaattttggagctaaactcactcggccttgatatactcgcattgactagataggcaccgccttctttgggacgatagctgagttggacagactcagacagatcgaaatattgaagaaatgcatgcatgacgatcagtgagcacccgacatgcactctcacatcatttgacaactcgatctactgcaacccttatctcataactatagctagtatttgtccatttaattaatatatagtaatacataaattatgatagtattaattaataattccgctatcagacaataatataaactcttatttgcaatgcattaattttgcataaaaacaatctaaatcccaaaggaattagaaaaattcaaattccaaacgtggtcaaaatgttctaaaattagtagtggtcaactgacacaagctattcttgcattcatatatattaataacgtatgatttctaggtcaataaaaaggtgcctcctcaaggtcatatctgtgatagcaatcttaacaggcaaatttgatgatgaagagtccctaccaatctgactcagagtagcaatcatatgttttctaacgcaggctggctcccaatggcaagataatccaaaatttctccccttacaccacaaggcccgaatttccttacaaccgaatttcccaatgcagccccgctctattatatattaattgttcacattcgatgtttgcaatgtaacattggggtgttcttttaatcatcgatgattagtacaatccagctttataacacacatatagaaagcccagaagaagtcacataggagggctttccattcctaagaaattgaagtgcttcaaacagaatcagcgggatgcaaatactagtaggacccttgtaatcccatggcctgagtgacagaggaaactactaccagcaggaccagtactgcagggaccccagacatgcatgccccaatcaatgtgattgacgcgcaccttattttgtactccctccgtgctttttactcctactccctctctcctaatataaatgcaatttagtatgaatttggacagtatcctaaaactacaaatctaaataaacatactgtctagatttatagtttaagatatatcacatctatactaggttgcacttatattacgatggagggagtagttggcactagatactattcatgcatgcaacgacattgatcacttctattcttttttttcctcccaaaagttttataattaattaaagtattttgaatgctaaatagtagtataactttactatttgtgtttactataaacattactataatttaaaagtggttatccaaatacatagtcaaaatctctttaagacagaggtagtaaaaggggaaaaaaagagtacttaagggtggtgaagggtctaacatttttctttgagggttgggattaaaatgagatgggctaaatttttatacatttttaacctaaaaatatataagagctaataggattgtgaaatgacatactactttgtcctataaaaaacttaatcctagctactaacctactccctccataaaaaagtctaattctaagaatgaatttgaacctttgtatgtccagattcatccctaaaaatggattttttttttgaatggagggagtgggcatatttttttaggctcatagctaggatttttttttcttttacaggggtatatataactcaacacattaccattcctactcgtaatatactggtactaccaaagtactactacaataactctcatccatcctacaggttgttactactagcagagctgaccactgctgagctatccgcctatcccttccatgattccatcccccaaccctccagtggctggcagcagcagcagcgtttggttgcagcaccacaccgtcacacgcggtggctaccgtcgaaggtgcgtgcattgcatgcctagtacgagtagtaatttaacaaaaaggaattgtttgcctgttctttttctctattctattttattcattttggttgcggttcgctctcggggcccggagcggcgggtccttgtcggacattcggcaccggcgctgtcgacccgtgattggttcaccgcggtggtgggccaaccgtcgacgcctgggaatggccgttggtgggcccatcccgaccgctgcccctgaggcttggagaaagccatggcgggtagagtgggcgcagtacagcaatgtcgactctagacctagttagtacttgctggtgccaaaattacgtccgtaccccttgacaaatcatactatggccttttttatattccaactttttcatcacatcaaactttcctacatgcacaaacttccaacttttctgtcacatcgttacaatttctttaaacttccaattttagcgtgtaactaaacacagcccataacgtcccactaatccaacttgaaaagcatagctgatggcaaatttgcttaggccgtgtttagatttcaacttttttttcttcaaactttcaactttttcatcacatcaaatgtttggatacatgtatagagcatcaaatgtggacgaaagaaaaaccaattgcacagtccgactgtaaattgcgagatgaatcttttgagcctaattacgccatgatttgacaatgtgatgctacagtaaacatttgctaatgatggattaattaggcttaataaattcgtctcgcagtttacaggcgaaatatgtaatttgttttgttattagtctacgtttaatacttcaaatgtatgtccgatcaggaggaggggagcgatcgggaggaaaaaaaaaaggagagggggagggtcgcgcgctcgggtgggggaggggggatcgcgaggcgcgcgagaaggtgggggtggggggatcgggaggaagatgaaagttattctataccccgggtgtagaatagtcttaccctattctacttatatataaaatatgttagtgttacttgtttgcttacttaaatatatatgatattcacttgtttaaaacaagatattggactattctataaaatcagtaaatattaggggctaattgtaaaaactataaaagaaatgatggggaggctgccaccaccatcactattgtcttttaaatgagtatagatgtttattggaaggctaaaatcctctacgccatacttcctgtccgaaaataagtccaactctagatatgaaagttggatttatttcggtccagtgggagtatttagcagcttgtgagcttgccttacaaactccaattagctgcatatatatatgtgcgcatggtgccatttgcgaggagctagattgttaacgacagcactacagggtgtataagttgacccatttaaatttaaataacttgtttttcagtatacatcttttagctggccggaatcaggtacaagataagctatatcctaggagtactataaatattccatcatatccaaactatagatattctcatatatttttaatcgttaattttaaggagtcggtgcatatcgcagtatatatattggaccaaacttttgaagaccagattagattcagcagtgtttaagatttgatgtcacagagaacatcgtgatgtagaccggataaaatgttgtttatttatagagctagctggaccatcgtttagacagtgtttagattaaggggtaaaaatttttgccgtgtcgcatcggatatatggacaaacatttaatgtattaaacatagtctaataaaaaacaaattacatattctgcctgtaaactgcgagacaaatttattaagcctaattaatacatcattagcgaatgtttactgtagcaccacattgtcaaatcatggagcaagtaggcttaaaatattcgtctcgcaaattagtcgcaatctgcgtaattagttttttttaagcctatatttaatatttcatacaggtgttcaaacgttcgatcagacgctggcaaagcccagacgccaccattgatcccaggtgctataccactataatgatcacaggtttcagggcctgtttaattcgtctcgcgatttccccctaaccgtgcaattagtttttctaatctatatttaatgctacatgcatgagttcaaagattcgatatgatgtttttagaaaaaaaatttgggaactaaaccaagcctcaaaagaaaaatggatcacattatcacaatatagagtactcctattcctatatctcaaataaactgaagtatcaattgaatagatggatagccagtcctcgaaagaagcagcactagaaagtacaggaaaacttacagttagagtatcatccagcatagcatcctggtcgtcgaacctgagctggatggttataacctacgtaagtacaggaaaacttacagattgtcatatccagcagaactatctggtcttgggttgtcactagcttccttcccacaaagttttacttttcagttttttttaagaaagttttctcttatatgcttaatttgcttgcagttgaatttacactgcagcttttcatttccagattaagagaaggtgttgctatgtactatgtccatcacattcttcaactagtacttaatttcagtaaccctgttttgcagctaaacatctagagatacgtaatattatgtaaacaacattttagaaaatctattgttagtttgaattgccagtaataacttccaaagatttttccaaatgaaggtaaagtaactaagcatggctattatatgaactgaaggacaaaatgaagtaaatttgagttcataccgaagagactgaggaaataacccggtatcttaacctgccagccattgaaatattagatttaacttgagccaaatcaggagggaactaacaaacaattgatgataaattcaacaaggaaaaatcaaaagaaaaaatggtagttaaaaataatataattactaatttgggagttcctaaactttggatgaattgagtttggattgatcattacatgattcttcactctacattaatcctgcccttttaaaagctcaacatcgttccattaagatgcaaaacaaatattgcgatgtaggcattgtgcaatattctaaaaaaatcctagaacacctagagacttcgaaattctcatatgaaaactaatttctcatggaaatacatcagcaaaccagccagaagttagaataacatgtattcttgtttttcgaaacaatactttcttgagtagagagacatactccaataataaccattcagaaaacatattctaaaattatatatagtatgtcaatcgtcctcacagattacaattgcagagagatcaatctgagcataaaactcaacaaattaataatagtgggcacccaaactatatagcaagccaatataaaatctgctacttttagcaaaaaacctgtctgatcgaccagttaatttttttttcaccatatggacatttaaatatatactacttcattcgtaaaatataggggatttcgtcaatgcatcttccatcccaaatggaaaagtatcgtttcatccgtaactccgtatcaattaactcactttcaaaagataaaatagtgcccatatttggaaaccagatcaattgaaggtacccagctacaattccaaacagagatacatgaatgcaccagtgagctacggtacaactaaattagatgacctacgtcttgaagctgacatcgtagcaggaaaaaaaactaacatcgttttcattttaattagtttatctggagctagcactgttctggaacagtgatacatgcatctcgatggatcatgttcagctccagaaacatctttaatcacatgtgaaagctagccagctgctaaggtcaaatggaaaagcatgttcagcatctactaacagatttatgattttatccccactaatttcttgtgtacttttttaatataatgactactacctctgttccaatataagtgtaatctagatagacagctgtccagattcatagttctataataagtcacatctgtactaggttgtatttatatttatagtgtaatctagataatttctagtgtacatgcatctgatctcttggaaaagctttgcaaaatattccagataacctcagcgcttgagagtttgtgcatcgattgtcaaatgccctgaaatagattggtgcatagatctgtagcttcctcacatgcacatccggatgcacaaatatactccaagtaaaggtggtgaagatgtgactggtgtgagatgggcactcctagagtagactagctacaagtccatggaaggcgatataggagcgggaccaattttccagcatcaagatcaaatttaaagaagagaattgtgtctgtatgatttctaagcaattaggtgagacatctggggactgatcgatgaaggaccacttacgctgcgacacataccacagttcctttttgagaagagaatagatgcaatatgcaaggcattgtgtgcccctcgacaagtctctccctgtcgtgaccctagcttagaaagcaaacagataagggaacaaataaacgtgtcgcaccaatggctagtaagatcagtttgagcgaaatgaccactcaggtatggtaaataaagtagtaggatcgatcaatggtgtcacatgttgaaatccgaatcaccattaaccaatggaaacaagcgcactgccgtactgtcctaccaacgccactccttgttgatcccttttccccactgagacccaatttaacatttcctttcacacattacctttcacttccccaacaagccaactttttgctagtgttgagctatatggtataatgtgcacatggcaatagcactggctcgaatcggatcggaaaatataattcaggaaaaaaaattagcatataaaattctggagattttaccacgttctgaactagaaccgagaggtaaggaccacaagcaatatataagcatgggagggacactcaccagctaagcaattcatagcatgatagcaagatgccgagcaaaatgtggcagtacgattgcatctcgatcgctgggctctagctcgccccacgggacctagccaattggaccagttgctacagctgcacagacaagtggtcaaagtcaagttagtgtgtcaagcaataattcctctaaaagggcctgcttacttactgagagtccatccatcgacctcctccatgattctatgacctgtggcccagcttctgccctctgaagcagcagacaggatcgatagcagttatacaacagctatctagcagcagtctactgctgggttaactggaaagtgaccaaactgaacggaacatgcatccactgtgctagagcccagaaccagagaagcaaagaaactaatttgagtgatacctctcaatgtactgtgatgggcatgtaaatctgaccgtgactccatcaaatggcactaacttcacatgctgctgctgaaaagcgagggtcaatctcccttccacagtgcaaaaacctgcagagcaatctacagtcatgttgacttgcacagggcgacattattcgcggtgtcagctttcaagcaaatcattttcagaaagcagctgcccattgtgcacaaactgcgcatcagctcatcaaatcaggttgccagaaaaaaagtctagtatacacccaaggaatgcatgccattggttgaaaaagaaatgtattgcagcaaaaaatgcattccctgatatggtgtgtacaagagttgcacgatcatctagtagctaggactactagctaggagaggtcacgagtcacatgtggaagctactgtttcaaattttcagctacatcatgtactcccatttggtgtagatagatcatagatacaagccgcactaaggtattactacaaaagaagagaaaatttcacaatcttacagacatgtggcttttccagacgatttttttcttctgaaaatcactgtcacagcttaccattaatcttaggtggattgttcgcgggtttcaccctaaggcctggtttagttcgcaaaatttttttaccaaaaacatcacatcgaatctttcgacacccaaataaagcattaaatatagatgaaaaaactaattgcacagttcgcacggaaatagcgagacgaatcttttgagcctaattagtctatgattagccataagtgctacagtaacccacatgtgctaatgacagattaattaagcttaataaattcgtctcgcggtttccaagtgaactatgaaattagttttttcattcgtgtccgaaaactccttccgatatccagtcaaacgtcacaagaaatatggaactgacgggaacacgggaacaatattgtccctcccatgttaaacctaaaataagtagcatcccgtgttcctcaatcctatttctcgacccatggatctgggaacttgtgggataggtttcacccacttcacctaaccctaccatggcaccacgccactatcccgcatgctccttgcttctttacagtgggctaggactaaattcaccacaaggtgaccatatttcaccaagcctggtcttataaaataggcagctaatactattgaccatctgctgaagccttggataagcttagaagaaattttctgatactcacattcacatgtgcaactattttcctatgctgccacagcatcggacatgcaacctaacgtgtgctttaggctcataaaaaagaacagtacaggcacaaataattctagacagtatattgatcagtgtcacatacataatgttagtgagagggagctaaaacaagatggctcaccttggcatctttcttcagtcaaccagaaatgtcccttgattttctggcccaactgcagcaatacaagccggaataaaagcctctttgtctccttccgaggctccagtcaagcttgttttagaaatccgagacaagttggtgagtagaacaaaataagtttgggctaatagattggccgcagctctcaagatcctggattgtactgaagaagaacattcatgtatcaaatgagaatataacctgatagataagtgggcatgtcggatacagatggattgatcaattcaggtaaagaaatggaagttcgcctgctaatctttatttgcatgtgagccatccatttctttgcatgtatagaatctacagctgtggccacaatactcgtgatgaaattaaaagctagctagacggatacatgcacgcacaaatcttgtgatgatacaaagagacaaggaaaaacaaaagatagtccgaaatcagatagtgcggacatgaaacatggcgtcacatactcataaaaaagttggatgcacacaatacacagtaggtcgatgtgcaaactagccaaattcatgcgcgaagaacagtccaggttctgtccaaaaaaacaaaacaatttaattttacaatctaacaagatcttgctaattaatttatattcaaaacagatataccgccacatgttactctgagacaaacataccatggcagacatgaatacaagagaagtccaatccagttttaggtttattgtatgcagctatctgtactaggctggaaattaacaaaatgcacactgacaatctggttgtgtttgtatacaaagcttacacattgcgaagtcatgcatcagcaataagaacaaaaatacttgaaaggatatttcacttgttaaggggatgctttagcagcatataaacaaaaatacacagggtctataatacaaaaaaggtgtttctacctgacatacactaaaatcatatagaagtgacaaaaaaaatttcaaggtcattatcctgtgcaatgttctaatgtgtgcataaaatggcaaactgctatatactacatacctaaagggatgtataaatacaaagagcttcaagatttggcacttttaatggaaaaatacaaatgaattatataaactataagttgaatttgaaagcacgaaacctccaatttaaacttcgtatatttgttgcatagtgttacctgaagttggcatgcaagctaagtcgtgaatgcagttcaaaactaacaatccatatggatgaacaagtccaatagaaaggacatcatagacacaaacatattattattgctgtgcacattcttcgtctaagacgactgttacatagaagaaattgactggcagttccagtaccaatgataaccaaaaccgtagtgattgattatgggaatgcagtagagatccatgtaaacacgttttaggctgtgtttaacagttgcatgcatattcaaattcagtttgctgtaccaaatgctaacttcaagatcaatcttcagagcagcacatgcatgatcagatgaaaacagcatacaacataacaattcagggagaaggacaaatgtatatggataaaattcaggttggtgtcctagctagttatacacacccagaagtttcggaccacattgcaagcaaactacaagcacagagtcatctcacccagaagttgtgagataacaaccttgtaatttatatcccttcctgggattgagcagccgctacggcatactgatggtattttactcctgattaatacaaaggtgtgcaatccttctgcgcattccctaaaaaaatcgacaatccgttaaatgcgaatttctgtccagttaaccatcagacttgattttgctcgaaaacacaattcgaaaatcgtagaatctagtagccaatagaacgtaatgctgaggattatagccaggaaattgatcccacaaatcggttccctccacaaatttcccaactcgcgtaaaacaatctgcgcgccttgcaagagaaattgtcgaaacaaatgatcacagcgaaggtggccacgtttcgtgagcccagatcaacccctattcggggcctaaagcagcaggcgctatattagcagaggccgcaccgaatgaccgaattcgcagccccaaacccgcacaaatccccccatcgaaaacaccaaactcgccgctgcgcagtgggcaaccgaaacgaaatcgaggagagagcgaggtagggaactgggaatctgataataaaaacaacggaagcggaaggggatgcctcgaacctccctccatgcgggagcagagcgcgcgcgcgcgcgacatcggggacagcggcggaggcggctgatccgcgccatcgcgacggtgagaggtgctccacctccattgccgcggcgcgccacgccggaggcgctagggtttcggttcgcggccttcggatcggcggcgcgcggccgctcgccgtggtggcggtggtgcggggcgcgcgttggcggcagaagagacgggacgaggtgtgtcggggaagaaaggaagggggaggtgtggaggcgaggcgacggggcgtgggcttcttcggcttcgctttctaatgggcctcgatgaagcccatgtcggcatgacggtgtggctgcgtgatgggcatcgcgagtctgatcaggcccatgtcgcgccaggtgatgagccgggccccaaggttctggtccataaaagagatatgggcctcaagtccactcgtaacggagcagtcagttaacaaattaggataacaaagaaattaggactatatatcctactaatttgttgtgtctcattaagttttaagttgctatattttaagatggaggaattagattttattttttttgaggatagatatttttgctaaggccctgttcgttctctccggttggagggatattttcagtgcacgcgaaacgagaaaacttattagattaattaagtattaactatattataaaaactgaaaaatagattatttattttaaaaaaaacaacttccacatagaaactttttgctaaagagtaccatttaacaattttaaaaatatgctaatggaaaatgagaaagttgaagtttggagttgagaaaaacaattgggcctaagagcaattgttttgttaattgtgtttgtgatcatcgagacgaaaccattgtgtttgctccgttgttcataatggtccatacatttttacattgttagtttttttctatgaaattgcctgatcgaaccaaatctaaactagattatcaattacttcttatgtcccatagtataagaaattttgaaggaatgtcacacattctgttactacgaatctagacagtaatatgatatgtcacatacatctaaaatcacttatattttgaaacatatggagtatttgaaaacggagcatgttaatttgctgaaaaaaaacgatgaaagggtggagttgctctacaactcaatccatgtttgatttgaagctctaaccaaaccatccctatgtttcaacatacctttacgtatgatgtcgaactacactgtttgtattttcccacggcaaagaagcacgaatgtgaagacaataagctgcatctcgaccagactactccctagccacaaaaacagtcgaaactgtttcaaaatcaaagcaatccaacaaccacgtggagcctctgtgagtcactgaatcggatcaaatgctgatgtgatgtatcgtatcactagtacaagaagctgcatctgatccacgtgctccaaaagaaggcacctacattttttgtagataatggaataaataaatatttcggcctttactcaaaagagctacagccaattattacatagaagcgattgacgaacatagtgtagatctaattgaataaaacacacagcaagcaacaataaagaatccagtctaacaaaggagattacaattattgaaatctatttgtaaatctccacccataattggcaaaaagttacataaccgtagtctccagcttccgacatgcaactttcagaaactcttcatcatcttcacacatttgtagttgtgcccaaaaccgaagccaatgggttactctgaaaatgacctgcatataggaaaatgatggtgatttgttaaaaactatattgttcctacccagccatattgcccaacaaatggcagaagctccaacaagtatcagtttactcattttcttatcaactcccaaaagccacccatcaaaaatatgagatacactaactggaagattaaatccaaaagaaaactgaactgctctccacagaaacttcgccaaatgacaatcgaaaaagagatgttgaatagactcattcttcaaacaaaacgaacacctcaagctaccattccaattacgccttgccaagttatctttagttaacacaacccctttaagcaagtaccacataaaaattttaatcttaagtggcatcttaagcttccaaaggcacctacatactccacgttttacacgagctagccagtagccaccagcacgtgcatgcccttccccttgattaacaagtactactccactacttaatttgtttattaattcggacaagtattgttactacttcttaataattcggaaaagtacagtagtagttgtttcatgtttgctaaggcaatgtagtacactaataatctattagtatagtaataattaacttaagagtgacattattgggtcccctgcaaggtactggttgttggttaaacataactaattgtgccggccactaaatgtgtccatattgcttgagcaccaagatagtacggaagattaatcaacggagttgttagttggaatagtataaatatgatcttccaatgatctcatgttcgggactatttcgtccacctggtcttcgatctatatatgcaaatttaaaaatatgcatcaatttaacaaaccaaagcaaatcattttgtcatggccgacgtgcgaaaagtctcatgcgaggaggaattaaggatcaacgagacgacgacggtggggcattggcaacatgttaccatatactccagcttgacagctagtgtgaacgcacgtgtcacgaaatggagacatcacttcctccattctcctcctttctttttgcaagtagaacagtgacagcgcctatgatctgatatattccagatacttgaaattgatagattgactgataatttgaaatgtaaataaataatataaatagaatgtaaattaagaaacgcgtaaataaaagttcaaaatccaaatcacatacacaacactacggcatacaaaaacattgattagtactacgtatatatactgggtgtattggccacttggcttcgccctaaaataacagattgtatatgatcggcatcatataagtttgcaaattaaatcacgacgatgtagatcgatccaagttaaagtgaaaaaaaagaagaagaaaatcaccaatgttatccggaagcaaatgaagaaaaactgaacgatcgatgaacttgaccggcagatcgaacaagacggccgagtttgacccgggaatcaaagttgacaatcgagatgaagtcaaagttggtggagcagtaacggatcagcagcaagcaggtactactagtagtagtagcaacctaattatccagtcaaacctctggttaattagcagagtagtaaaacgaagacgacgacgacgacgaccaagacacaagaacaagaagattagttacttttatcttcgttggcacgtgcggtaacagctatagctagctgatcgaccgatcggacgtacggatcagttgacattatccacgcttgaatcgaaacggatggagaatggttgtctaaatcaatctcggatgattagtcaggggttacagctaagctcagaacggaaaacggtcctggaccactggagccatgcgtgcaggatggatatgtttaggtcaacggcgaccgagactttaatttgcttctgattgttggacaaagtcaacgctgttgtcaactcgatcgtaggatcgatgtccaataactcctctccttaattgggcgagcccgttatagaggtgaaaatcctatcttactatacagttataatccactagttctaaagcttaccatataaacatgccaactcatcatccactagcaataattacatataaaacttatgcaagcatgtaacatcatctataattcattaaattctacaaatcaacatccaattatattccttcacattatttttcacaatatttttataacacacacacacacacacacatatatatatatatatatatcatttttataatacttaacatatattcatccatataatcaaagtacgggatatcatatttcatctacaagttcatacattgtctacttaatttatttctctcttaacatattttgataaaccagttttatttgttgttttacttttagctcaattattaaaaaaaaagttacttactaatttctgcagcaaaacgcggggaatcacctagttaaattaatgagtaaaacacatggtcgttctaaattcgagagaagtgtcacttttagatctataaatttgaaaattgcacatctaaatccatcattttgttataataaaccaagctaatccaaaccttgtttcaccggggatgaccgccaatgtggcactccatatagacatcacttttgcacttagtcccctccgcatctcagcgtggtggtaattttgtaattagccccttcctacaataacagcctgaaatccaaaaaataaaaaaccccagaacactttgtaccttccattccacatatagtattatcaacacatatgtgtgcgtgtggttatgtttaggggtgggcagaaaaagaccgaacaaaaaaaccgaaacgaaatgaccgagaccgaaaaattcggtcagcactttctactcaccaaatttcgttcggtcaattcagttttagggctcggttaaccgaattgaccgaaaaccgaaatacagcattagcccattaggcccaatacctcctcagcaaaagcaaaaccttatccaacccaccaccaccagcatcctcctctccatccactgaccaccgggcccttcccatccccatcccctcctccctcgtgctggttacgccgacggtgacggtggagctcatgtagccgctcctccgcctcccgcagctgctcctctgcctcttgcaggccgccgcctccgtgccacctccacctccagcgctggcgccacctccacctcggcgtcgccccatctccactctccagcggatgtggaaaaaattggtcagaccgagaccgagaccgaatttatcggttctgagattttttagatgaaattcggtcctgagtttacaaaaaccgaactaaccgaaaaaccgaagaccgagactggatttttcagtctgcctgaacgcccacccctagttatgttcatcggatcgatgaaacatatgtggtcaccttggcaccaagtatacgtgaatatttcacgagccaagaaacataatcaccaagaaaatactatgtttttgaaaataacttaacagaatttctaattttcaaaatgatctagttgttatagaaattaaaatagtggccgtttaagacaaagaagtaataagtgtgccgaaagaaacaatcgagataggctatcatcaaagatagtaagaagcttgaaaccatctgatacgccggaatctaagaagcgaagacgtttttgtgttgacaagatatctactccctccatcccataatatagaaacctaagaccggatgggacacttcatggtacaacaaatctggatagaaaacatgtccagattcattgtactatgaagtgtcatatccggtactagattgttatattatgggacggagggagtatgtcttaaaataaaataacatcggatagaatgttacactatcaaatacaaaaaatctggatatacgtctgtccagattcgtggtataagctaatgtcaccatatatatatatatatatatatatatatatatatatatatatatatatatatatgtcaatcggtgcaagctgttttttttccataaagctatattgatcatatgatcgatatttgatataagaaagttgacttttcttgtttttcatttgtacttgacggcgaataatgaatttgaagcatgcttatagctttgtaaatttcacgccccataatgcttagctagcgctagctcttttcgttttgtcaactgattattaattcgatggccacttgtcttcgtttgacaattaagtcggcgatcgatcgatcgatcgatcttgacgacctagaaagacgaccagccttttaatttgcggtcgtctacgcatattgatatgatgattgacttaacaagttttttcgttttcctttttttgaaaaattgacttaacaagctagctccatctatatcgatcacacatgcaatgtgtattaatttatgtatatgcgcaccttactactctattcgtcctaaaatataagaagttccatccatcccaaatataagaagtttttttagatcaaatataagaagttttagttgtatagaacacatcttaatacaatgaatatgtacagacagtatatacaatgtgtcacatctaactaaaactttttatatttttttagacagagagagtaataaagttctcaaattattttatgtaggttcatgtggaaaacatgaagtatagttgctagtacaatagatcatctgtgtgcaatgcatatgcatcatatgcatatgcatccgcgtcgtcgcagtcgccgcagctggataaggatggaggccagccggacggagcaacacgtgacgcgatcgaacccgacgccgaccgaccgaccgaaccaacgaacgttgaccggcgccgtccgtccggtccgcggtcaaggtccagcgccgacccacttgccgtctcgcccacgacttttttattccccccccccccccccccaacctcaatcctcctccgacgaacacgccagtggtccacgtgtcccgacgacgtcggcgtcaggacgtgggccccacctggaagagggtgaccggacttgggggcccacttctcttttggtaccaacgcgtggacgtcgtcggcggggtgagggtgagtacgcgtgggggcattgggcttggcggcggggcggtgcaccacgcgcgtcacgtgggggagaaggagtttgtgggtgtggctggtacacacgcggcgcggctgcatgccggaggaatccgggagtccccagatttgggtggatatcccgctgcgctgctgggcgccgcgcgcgacacgacacgacacagcgacagacggggtactctctacgatctccgcctgcgtcgtcgtcgtcgccttcttcttcttcttcttcattttttttttccctgagagtgcacgcgtgggttcaaccatgcaactgcatccaggtttcaggtactcctccgtaaaaaaaataaaacgcatactccctccgttctaaaataaacacacagctataagttttcgtgtccaatttttatcgttcgttttattttaaattttatgattagtatttttattgttattagattataaaatataaataatattttatacttgacttatgtttttagtttttttcaaaaaaaattaaataatatgaatgattgaagttgaaaacgaaaatttatgactgcacttattttgagacggagaaagtaagaatgtgtcattctaatgtgaggttgtcttttaaagacggaggaaataagaatgaaatgatcgaaaatggtaggaaatagtatattatttcattgtcaaggaaaatgatcgaaaattttttcatatttatggatttatgtagtatcacgtttacagaaattgaaaaaaaaattaaaatttgaatatagtcacagtaggtaaagatgttattattatattaatattaattttatgaaaataatatcggtaaggtcagaaaatttatataccattttcaccttctaggtatcctatctactacgagtatgtacgacgagagaaaatacaaataccacaatacctccattttcaaaataattatcgttctaggttttttaaaaaatttaaggtctaataaaaaaatagtttcagctattaaatgatgtaaagttgatagtgagagtatagttgagtatatgatggagaaagttttaaattattgatagttgatgtgacaaaagtacctaaaatgatttttttagacaaaatcaaaattgtaaattaacaattatttcaagatgaagagagtatatactccctccgtttcaaaatatttgacaccgttgaatttttagcacatgtttaaccgttcgtcttattaaaaaaattataaaatatgtaaaactatatgtgtacataaaagtatatttaacaatgaatcaaatgatatgaaaagaataaataattacttaaattttttaaataagacgaatggtcaaacaaataataaaaagttaacggtgtcaatattttaaaacgaattgagtatatcgttgagagttggtcaagtaggtctggtttggattgcttccagcttccgtagcgtcaaagtttcgataggtagcgctcattactgactcctcctctctccactaattcccaaatataatactactaactctttccgggatttaaacatttttgcacaatatagtagtttctcaaaatccaagtatttttaaccaatcaaatgtttaggaggagaatccaaactacaatttttgaacaataaggtgaatgaagggaaatcttaatttcctcttaactgaatctttactgaacaatttcaatttttttatggcatcaagccaaaacgtccgtggtcctaaaaatgacctaactcttaacacaacggtaattaattaatgcaagggagtattaaaaaactatcgcaagtttcttaggaaaacttttaaatctaactatattataattgtaatataattttactataactataatataacttgtatataagtactaaaataatatgtgcaactttatatctaacttatatagagattacaatatagttacagtgtaattacactgtagttacaatataattatattataattaaactataattatactatagttacatataaaagtttttttctgaataaacttacgatagttttttagcaattccatattgctatcacagttgttggagaaattaactaatgccacaaaggaattatataattatattggatcaagtggccgtttgacaattccagggaatataatggtgaataaatgtgcatgcttcctgagccataaacagtgtgattttcgtaaaatggaatactatataaatttatagttaaaaataaaattattataaaaactgttttaaattcatttcttaattttataatatgtaattaattcgtttatactctccataattatcacaaatcagctaaacattcaaacattgagctattccatacaacaacaaacacaacctcttggtagaatgcatggtagtctacataattcctccgttggagaataacctcaacgtattgagattcttctttaatataggtcactgatatatgagctctctatcaaataaacccacgtatcaatgactgaaagtcaaagagaaataaatctgaagatcctctttcgacctggatctatcgtagccttataagagcacccgcaatggtaaagtaaggtgctatctataaaacatgtacatctcagcaatagactcgattaatagtaaaccaccttaatagtatgtctacattggtatctataactctctcatgtattgcctcgtttttctctatagactatctctaagttagtagatagctttgctctctctcttcatttaataccttccaagtaggaaaatatgctgacatggatctcttgtagagagcctatagataaccattgtgggtgccctaagacaaagtaacaagctccataaaagcgtccatgttcttcctctcttaatttgtccaaacgctattgaactatgaagatcccatattgcaagttgttcactgctgctgctccgattttccaaccgtccctttgacgagctggattatcattcccaggcctgtttagctcacaactttttattagaacttttaatttttttatcacatcaaaacttttctacatacataattttttaacttttccgtcacattgtttcaatttcaattaaatttctaattttagcgtgagctaagcacaccccaaatattttcctcgcttataataaaattttcgtggcctcctgtgctagatcttctcgctatcatataggagtataaaggatgttaacaagctattaaatttacttacaccatgaatttaccttttaagacaaatctggttaaatttactatattgtgtaattaacctataacgttttgcctatgcaaacgtgaaaactagcgaaaatgtaaatgtaaattacacatggaccggtgaattaagaatatactacgtataacttacaacctctctgagatggacagataccggctcgtgagtataatcacgaagggatgcttttgtgtacaggggaattaattagtagttggaatcaattcagtcaaagtagcaaaagtttgattgttttggaatcaactcaactcatgcggccatgcctttgtacacgaggcgacaatcttatctgtacaccttctagcttctagaacaactcgatgatcaacgacatcatagtctgcgattaactccactgatcgattttatacggtcaatccacagtccagatgttgaaagccaattaagaccttaatttggctttctacctggcaaaccctaaaccacgtagtacaagactacaagttaatcctcttctctccaaataatgagaacttcgtcaacctttttagaatacttcttttcaaggtagaggagcatgaatataaccaataacccttttatacaaatatccacgtcaatactctttaacacacatgtctaaacaaaattggaaacctggcctcatataagggcacatgttttaacaaatgaacacacatacacacatatagcatttccacttaattaaaaatgcaagcaacagtgttaaatttgggatttaaaccttgacgagcaagaaaaagaactaattgaatgagctatgctccatttgatgtgtttaatttggtttctccaaacatctcttccaatttacacaacataagccttgtcttcacgattttccacttttttattttattttaattatttcatatttaaaattacaattaaatagaaattctttcttcatcgataaggcctatttcttttcatttagaggtttattatgggcgcgctttctaaactgctaacgacgtgtttcatgaaaaactttatatatatgtataagttttttttaaaaagttaaataaatttattttaaaaatttataatagttaattaatcataaactaataatccatcttatttcgtaggcagttgttaaggctggacaaaacattgttacgaacatggcctaagtataagaatatctggctagctatctaaggggaaaaggatttatatttaagaagtaccctctccatttatattataaggcatttaattcttttttctagtcaaactttgttaagtttaatcaagtttaaaaaaaattaacaacatctaaaatataaaattagtatcattaaatataacattgaatataattttataatatgtttgttttgtgttgaaaatactactatatcttttttataaatttaatcaaattcaaataagtttaactagaaaaatgttaaatctcaactattacaaaaattaaagatgtttttacgggtactctggtacatcatctgtgtatgagtcggtttttaagttcgttcgcttttgaaaatacagatccatatttgagtcgggttttaagtttgttctttttgaaaatataggaggagtcgtataagaaatctaaataaaaaatttacatgctaacttgagatgatcgggcttctaattgcagctcatgattttctagaaaaatatatgtaagtaaatttctacagtgaattttacattaactaaaccgtgtaacgataataacataaccttcacccgttgtaacgtacgggcattttttatagtgacttataaaatgaaattaatagatggaatactgtagaatggaagaagcaaataatgtcaaatattaccggatacctttctcgccgccgggaggcagtggcatatatggtcacggattcgcagcgtgcagagtcggtaagtcgcaacgtttttttcgtcgcgatgaaccttggggttttctcgatcggagacaaagggccgcatggtgggggtcaaaccgcggtgacggagcagcgtccggtcggtgtcacgagccggaattgcagtttcggcgcaccgagttcacatgtgggcgaatactgtgctccgacaaagacacctgcctgcctgcctcgatctccatcggtttcactctctgtggataactccgtagtatattagtttggttgaatattgtcgctgactaaggtcccgtttgagttcactactacctccggccagattcataattaaaaatacttacattttagaacggaggtagtaaattaaattaaaaaacgtaaaaagattattaatacatagttaattaaggttttaaagttattttaaacttaaaaagtatgtatatgatgttttaaaaccacttttatgtaaaagtttttttttacagaaaatgtaccatttactaacaaaaattaagataaatctgtatcttaacgtctaatccaaccataaaaagaaaagctaatttttataaataaatttggacaaacaattcatacttaaaagttggctctttttagaatggagagtgtagccgttgcctatttagaaccgtgtacactgattaatattgcacaccaggagcggacacactcgttttttataagcatatcttatttttctaagcagctcttagaactgaattagtatatcttattattgataaagatgtacccttgttcatgtatatatcatctgcctaaagcataactgcataatacactgaaaatgcgagattcgtggtgagtcggatcgaatcgaacctcggtgaagaggttccaccacagcctggccaatttgagctgattctgatacgaacagaaatagaaatatggtgtacagcaaggaagatttaaacgaacctagctgaaagaccagatgtcccgttttggtttcagccagacgacattcaaataatccgtattaacacaatagtaaaaatactagctggtacacgatatagaatttcagttgcgtgttacagtgttactacttgtttgaactccggcgtagttaatttttaattttataattatttttgttacccggtctacggtcttggattttggattttagaccgctaataatacaagtgcaaatctcttgctttaaaaataattgtttttaatgataatttgtcatccgcttataagttataagccacaagtcaaaaaaaaaaatcttgaaaagcaaacccaataagtgttactgttatctgcccaacagtgaggttattttgttttttttttcacacatacctttgtcaagttgtcaaccaaactattctcagaaaaagaaattaacaccatcaattcgtccagcaaacaggagaggacaaattgcaaaattgcaagtcgacagtagctagttgcagcacaatgacctcaagtcatgtggttgcttgaattgcccgttgctgtgtgtgtgccagagaacatagccaactcgttcttggcaaccaaccaaaccacttggtccaagtcttgtgttgtgcgtggctcaagccaagtacactttataacccgttctttctttgttcctgtcaatgacaagtctcttctgcaacttctgcagtaatcttgcatatctttcagtaacaattacagagtcatttccgtttttcttcatcacgaaaagaaaagtctctgatacatctgaattgtagatttgtcaacaccagacgttccaatcctaataaccctacattggagtagtacaagaactggaaaatttgggatcatttgcataattaagcttagtaaacgacccaacggcgcccgccggtcaataacagtggattaatcatgctattagttgtcataaacaaactttttattttggatgcagtattgactcgtgcggcgagagtagtcttccccaaaagtatttctagtcaaaatttggcaaaaacctaagctattgtatagtacaaaaagctctttccggatgtttgatttgatttaatttaagaggttaatctagggcccctcaagtttggagctcaccaaaccaggaaagacaccaagaaaacatagtactgtactaactatgtgcatcacacctaccctgctctacaagatactctagtactatagctactttgcccagttgcactaggaattaagcataggggggaaatgaaatcggaacgggagtcaaaaaaaaaaaaaaagcaacctaggagcgaatctggacaaacctctgtctagattcgtggtagtaggagggtcacatcccttcctacattgcttattttgggacagagggagtacaccatccacaaatatgtgagattttaggttattttagcaaaatttaaggttaagtggaaattaattgatgcctcagataatttacttgattagaaaaatcacgcctaatgatttaactaccagtgaataataaatgtagctattgtatttgcaaacaaaatttaaaacctgaaaatgtttatattcgtgtatggagagagtgtttttctaataaaacacataaagccaagaaaatgagtttctagtagagttgaaaaggggaagaattaagaggttagacactgatccagctaagttattattggcaagtgcatgctcactgacaagcaagggtccaaaaggtggtactccttccgttttgaaatatttgacgccgttgactttttagcacatgtttaaccgttcgtcttattcaaaaaatttaaataattattaattcttttcctatcatttgattcattgttaaatatatttttatataggcatataactttacatattttacagaagtttttaaataagacaaatggtcaaacatatgctaaaaaatcaatggtgttaaatattttgaaacgggggagtatttagtagtagggggtcaagaagtcttgcatgtccccttcttcctccaacttcttctttgccaattgcaaggcatgcagatagggatctttattaatagcaggcatgtgtggtgtattttcttgactttggaccctgccccactatccagcccaaagaccatgcatcatgctgctggccgacatcctgactagtctcccacccactcgttattacatcccctaattaattaatcatttctattttgacaagataaaccatacctttctctaaaatatagagatttctaatatttatactttggactatttggtagagtttcaactcctaaatttagcttcagaagtaattaagtctaaattagaattgtgaagcaacctaaacctagttccaactcttaattttattttgtgagagagctccacccaactctatttctattttaggtggagctgaaattgtttggttgagctggagctgtgccaaacaggctctttatctaaaatatagctatttcttcttgtgctatgtcatatcaaacaattataacaatgttttatttaatttatctctatatattttatttcaaataatcataaccatcttttgttaaattataaaacgtcttatccactcaaaaaccctagtaatattttaaaacgagtattatgaaatgacgagatgacaaacacaagaactagagggatgtggtttttatttttgttttaaaaaataataattcagttggcgccgctagctgttccggtcaccctccagtctccttccgattcttccgccacatccgcatgctcgaattccccctccctccatttctttactcatttcccttcccctccgcttcctaatcctgcgtgaccccagacgacgacgacgacgagtacacatgcgtttgagcgcgacatccccgcgcgcgccttcttcttcctcttcctccctcctcccatgactagaccatcctcgccatattcccgcctctctatatatattagggctcagctcctcctctcacctcgtctcctcctctcctctcttctctccttggctcagcttgacatcgtcggagcagcagaaaagtttgctcgatcgagctagctaactaggtcgtcggatcagtgataaatcgttcgccgatggatccgtggattagcacccagccttcgctgagcctggacctccgcgtcgggctgccggcgacggcggccgtcgccatggttaagcccaaggtgctcgtcgaggaggacttctttcaccagcagcctctcaagaaagacccagaggtaggtcatgtgattaagcatacgtgcacggacgatcgacggccgccatggctgggagcgtgatgagcttaatttcttgagctgatttggggttttttttgttgtgaaggttgcggcgctggaggcggagctgaagcggatgggcgcggagaaccggcagctgagcgagatgctggcggcggtggcggccaagtacgaggcgctgcagagccagttcagcgacatggtcaccgccagcgccaacaacggcggcggcggcggcaacaacccgtcgtccacctccgagggcggctccgtctcgccgtcgaggaagcgcaagagcgagagcctcgacgactccccgccgccgccgccgccgccgcacccacacgcggcgccgcaccacatgcacgtcatgcccggcgccgccgccgccggctacgccgaccagaccgagtgcacctccggcgagccctgcaagcgcatccgcgaggagtgcaagcccaagatctccaagctctacgtccacgccgacccatccgacctcagcctggtacgaatccccaaccccaattaacatccgatcatctcatttcatgtgcctaacttaacttctttttgttctgaattctagccttgattaattaattaatcctgttcttgcaatgaatccatgcaggtggtgaaagatgggtaccaatggaggaagtatggtcagaaggtcaccaaggacaacccctgcccaagagcctacttcagatgctcatttgctcccgcctgccctgtcaagaagaaggtaacttaaattcctctaactaattccaaagtgatttcgtaagttttgctaaatttagtgcaaattcgagcctgtttctgaactttgttcgtggttcaaatgttgtttcaggttcagagaagcgcggaggacaacacgatcctcgtggcgacgtacgagggggagcacaaccacggccagccgccgccgccgctgcagtcggcggcgcagaacagcgacggctccggcaagagcgccgggaagccaccccatgcgccggcggcggcgccgccggcgccggtggtgccgcaccgtcagcacgaaccggtcgtcgtcaacggcgagcagcaggccgcggcggcgtcggagatgatcaggcggaacctggccgagcagatggcgatgacgctgacgcgtgacccaagcttcaaggcggcgctcgtcaccgccctctccggccgcatcctcgagctctcgccgaccaaggattgacgattgctactgatcgacgcggcggattcgatcgcttcttcttgcaactgcgggcatggccattgccatcctctcctgtctctgcctctctgttcttggtggcgccagcaagaacacgatcgacgcggtgtccatccatggcggagttcgatcgatcgattgatcggctagggaggaattgatgattcgctgtatataacctagaatttttacacgattactcgagggatagatcgacgagcaacattttcggccggcgcccatggctgatcaaccaacgatcatcggcggcggccggacgtgagcaagacgattcagaaaaaaattcagatatttgcgtcggcaaaagacgcttgtaacatgtagagtagggaggaaaattatttgaagtgtacgtagtgcagtccttttgagcaaaattaatcccaaatttgcttcggtcccgaacaattcaacgaaatcagacaaactccccaaactttctgtacacttcactgtctcacttgaggtgaagtatcaagagtgaactgaaattcaacgaggagagacgctgacatgtgggcccatccgtatacattttttactgaagacaagtctgcgaaagtaggctactgacacaagctggttgacgcgctccgctctgcgacaaaacgaggcgagaggagacgaggactcgatcgggacacgtggcaggcggtggcgggtgccgcgggaggcgggggaatcgaggaaggcgagtggaaacgggctgcgcggcggcggcccgggtgggcccacctcggtgggcggtcaaccacgtgcagggcggcgggggcccggtccacgctcgccgcttcctcctctcttcttccgcgacttttaatgtttttccttggagactatttttcgctaagaaaatcagtgagaaacattctgctcctgcatttctaaaagcttgggattatcttgtgattttccaattaaacgtattattttacatccaatttcaaaaatatattgataactggtcgagaagaataagtgtaaattttataaaactacatgtactttagtcaaactatcacagaactatagattcaatataatatattataaaattacatatttaaagtaatttatcacataactatcacaaattacaagttttagatcaatttaatcataaaatttcaaccattataactcaaagcataatattagagaaacccaaaatatatagttttgtgataatttttttattaaatttgtagttctgtgatatttagccttaaatctgtagttttgtgataaatttatcgttaaatgtatagttttgtaatatatcatcttaagaatgtagttttccaatagtttagctcaattatttgtaatgtgtgaattttacttaaaaaataaattagttttgcatatagggcctatttagatcccctgacaaaatttttcactctattacatcaaatgtttggacacatgcatggattattaaatataaataaaaaaaataactaattacacatattgcgtgtaaattgtgagatgaatcttttaagcctaattgcttcatgatttgataatatggtgctattgtaaacatttgctaatgacgaattaattagacttgataaattcatctcgcagtttagaggtggaatctgtaatttgttttgttattagtctatatttaatactttaaatataagtccatatatttaacatgacacaccaaaatttttcaccataatctaaacagccatagatatatactccctccttccctaaatgtctgacgccgttaacttttttaaatatgttttaccgttcgtcttattcaaaaacttttgtgaaatatgtaaaactatacgtatacataaaagtatatatatgtaacaatgaaacaaatgatagaaaaagaattaataattgcttaaattttttaaataagacgaatggtaaaacatgtttgaaaaagtcaacggtgttaaacattttgggatggagggagtatgtagtactatctctgtctcaaaataagtgtagttgcgaaaatccgtgtccaacgtttgaccgtccgttttatttaaaaaatttatgagaaaattaaaaaaaaagttagtcgcacataaagtactattcatgttttatcatctaataataataaaaatattaaccgtaaaaaatttttaaacaagacgaatggttaaactttatatatgaatagtgtaaaagtcgtggcgcgtcgcaatcagcggcgcgtacgtgcggtggtgcgtacgactggccggctgcgtcaaccagtcgctcacctcagtcacctgttcgttcgttcgttcgctgggctggatccagctcgatcggtccgacctgaccgaccgaccgaccgaccggccgaccgagatgcacgcgagctcggtcgcaaggtcaatgggacgggacccaccgtaacaaaattatgctgaatgctgatcccatccaatgcatcgtgtacggagtatatggatacacgaggacattccaatccaatgcatcgtgtcgtgtgtggagtatctattgtttgctccacagttgattattagataatgaaataaaacatactggtctttagattgagttataaccaattattataatctagcactttaaaagagtgtaggctaaaataaaacgaaacacaccaaaccaaaatagaagaaaaccaaacaggacaaggaaaacattattctatattggtgaatctccatctataattggtaaaaagtttgcataatcatcgtttcaagcttacgacgtgcaacaatcaggaacttcccatcatcatcacacttttgtaattgtgtccactatcggagctaatataatgccctgaaaattgcatgcatatagtaaacatatggtgatttatcaaaaaccctaccattcctgctcaaccataaagcccaacataaaatagaggctccaacaagtatcagtttactctttttcttgtcaacccctagaagccaaccataaaaaatatcagatatgctactaggaaggtgtaatccaaaagagaactggactgctatccaaataaactttgcataatgacactccataaataaatgttgaatagtctcatttttcatacagaaacaacattttagactaccattccaattccgtcttgctaaattatccttgttaacaccacctctttaagcaagtaacacataaagattttttatcttgatcttgatcttgctccacagttgataaggcatgcaaaattaaacataatagcaaacttgttaatctccatctacctactcctattaaccaatcatttcttggattatctatttcttcaatcatttccacttacttttataatacctgtactcacctaacaaatatttcatttcgagatgaaatgcatgtgttctctttaaaaaaccaaggataatgtaaatgctcacaacacatacactcaccctataaatacatacatgtataccctaattcttagcaccttcgagactgagcggtaaatcatgaaattgacaaagtcgccatgggtacctcactaccgattgggtacgtatgttgccactaaaacaataattagccgtaaatacgagcatcgtgttaaatctacgatttgaacccatatagataattaattagtcataaatacgagcaccgtgttaaatttatgataagattcgtaaccagttaagctatacgttcacttcgttatgtatgttttttaaaggcaaatgctaaaaataagataagaaatcaacttcgtaattatggtttatgttttaatatttaaattacctagcctttgacaatttttttgtcttgtcattttaaaaacaatgaaaggagtgttgggtaatacttccaccgccctaaaaaatcaatttaaaattgtatttaacacaatttagtacaacaaattaggatatgagcttgttcatactatattatgttaaatctaacgtttttttagacggaaggagtataacacaagtcaaattaatcttctcagtaacaagctagaaaacatcataaatgaatctcaaaatcaaaagcttaaacttaaaattagctttagataataattagcttatcttgtgagacttagagcagagagcagctggttccgtggtcgtgcacggcactagctgcgtactcctacatcgtctagtcaagcgcacgacggcaggcggcaactttggttcgttctactagcctagctactctccgacgtctctacctttgtttgattaagggtgtgtttagatcacgttaaaattgaaagtttgcttgaaattgaaacgatgtgatagaaaagttaaaagtttgtgtgtagaaaagttttgatataatggaaaagttgaaagtttgaaaaaaagtttggaactaaataattagtttgaaaaagaaaattttcgtgtgtcacattggatgtttaccagatgtcggaaggggttttagacacgaataaaaaaactaatttcataactcacagtgagacaaatcttttaagcctaattaagccgttgttagcacatgtgggttattatagcacttatggctaatcatgtggactaattaggttctaaagatttgtctcgcgattttcatgcaaattgtgtaattagtttttgtttatatttatatttaatgatccacacatgtgtctaaagattaaatgtgacgtttttaggaaaaaaattggaaactaaataagcctaagtgatcgaaagaaaataaatgaataaatagacaacaggcaatattcttgttacttgcctatcggccgcgacggccgggtcgttcctaactcacagatagccatgaatcttcgtcgagtgtagtaatcctgtaggcacgtgaacacatcatagtagtattttaagacagcaactattgtacttattaatcagacaagaatcaaattaaacttaacttttgacattcagaagggtccgtgggtgttgcaggcacacttgggaacttttcattgtcctgtcgaagtaacaaatgggcctcgatcgtgaagcagcgcaagaccaaggccagacgacgagaagctaagcgaaataataacttagggggtgtttggttgagctgtggtttttagaaaagctgctgtgagctgtggcctgtggaaaagcagctgttgaaaatcagctgtgaaaaaagcagaagcccgtttggttagagcagctgtgaaactgtaggttgtagaagaaatacctgtaatacccctaatggcatgtgggactgtttatatgcaaattactcatacaaacctaatatgttcaatattttgtatttgaatgcccaatttttaaagaaaaaatgtataattttttcatcaatcaaagtttttcatcaacatatattagttttttatccatcaaagtgatatggtccacataaacagagcaaaagataaatggttcatacaatgatgccatatctaaaaataactatcctcctcttgcactaatcaaagcatcagctatcctagtacgaatagtattcatggtatcatcattctctgcatcttcactctcatcgtctgacgtgtcacttgtatcttctattaagtagtcctcatgagcatcacatctctcaaactccttatcacgtaaattgctatcacggacgaagttatgcatagcaagacaagccatgatgatatgcttctgagtagtaggtgagaaacttgggatgcccttcaaaatacgccacttttgcttcaagactccaaaagacctttcaataacatttcgaagggaggaatgcaagaaattgaacacctcatactttccttgaggaggtcccgaacgatgccgaaattctggtatatggtatgtggttcctttgaaaggtgcaggataccctattcggtttggataacctgagtcgacgagataatattttcctataaaactaagttagtaatgcaaataataatactagtgtacaaatattaaaattaatgaaggaaccatttatacctgtaggaggcatgggaaatgaaggaaaattagccaatgcatgactgaggatgcgcgagtcatgtgcagaacctggccaaccagcaaccgcaaagataaacctcatgtcaaagtcacaaatagctagcacattctgagatgtatatccatgacgacatgtgtggctaattgtttcatccaatggcactaccactgaaatatgtgaaccatctattgctccaatcgcatctttaaagtatggccaaaatcgatcctctctcaaccttccatgctccgtagaaaaagtaggatctctaggagtaatattgtctttagctaacttgcgcaaacacttcaacacttcatgaaacttggtgtgaaccatccaaagtgaccgtgtgaaacgactttcaacttgtgaaaatgattgtggccctccgacgatccacaaaaacatcgtcaatgactcaatggatgaaacattgttgctcgagctcaatccgtaggtagagactagcaagtcatgaagtgcatgaaaaatctcagggctcatccgaaacatcttataaaaataccttggacgatccatcaacctcatcacccattgaattccagtttctggcgtttgtctgtatgcacctttttgcaaataccgctcagtgtacaaattggccatttctcccttaatagaagcatgttgggcaaggtcagctagcatcaatgatcccttttgcccttctttggctacatctactaattttccatccatctacagaagatatagtaacaattaacggcaaacaagtacaacaacaagtacagaacataacatcacatagggaagtaaatattagctcacaacatggaaataacggttttacatgtccaagcaaatattggtttacaacatagaaataaataactcaaagtgttctcacatagggaagcaaatatcacataaacaaggcaacaatcgataaaaataaaattttaatgtagggaatcactaacgcttcatcatctccttttcatgctccctctcgatcaaatcgagtcttccttcatttgtttctaggtagctaaagacctccctaaattcaggcttcataatcaaagttgtggctgtgtgcattagagcagttttttcttctaccccacaatctttcatcatcttcatagcctctttaatggtagggactacattgcatggagaagctgacgatgcttcaacacttgtacaaatcttttctgccgccgtttctatcttcaaacaagtgttcttgtacatacgagcgaatgggctcttctcatccttatctcgaacaatagtggacgaccccttgcgtttatttttttcggggttcactgtctctgcaggttttggtacctcagccacatcatcatcacttgcctcatcggaggatacatttccaggacatgatgctgaagccccactaacatgtgacttgccaaaaatgatatgcaaatcatctaggaattttggtccttgtttgcgaaacttcacatgatcgcatttgattcctttctcacgattgttgcatctctgaaattaaataaataaagttagcaaggcacactacaacaaagaatagaaaaaaaatatcacagggtgaaagaatagtacttacatcaaggtgttcttcccaccattccggcgaaaagacaatagtttgttttgcctcatcccatccaagaccagtggcacaattcttgaactccataaacattgtatattcctttttcaacacatctaacttgttcttcaattgttttttggttcgctcgtcacccgatttttctgcaaacttggaaacaacatttttccaacccgtagtggtgaaaattcccatgggtctattcccagcttctatctcttctttgcaaacatcaaacaaatgccttacaaaaccatcaccccaatctgccttgtcacccattcttgaaccaaataaatttttgttcaatcaatttgcacgccaaaaatcaatttgctgtaacattctaggggcaacacatgcatcaacacaagagcaggagcattcggcctcacctttcatgccggccggagcagtggcgaaggagtcgtagtagcgtcgggcggcgtggggcggcgtcgggcaggggtggctttgggcagcctggggcagcgtcggccggcgtcggggatcatcggccggcatggggcggcgtcggccggcgtcgggcaggcaacgaggagacggccgtcggccgtcgggcgacctggggcgacgtcgggtggcgtgggggcgggcgacggggagacgggcgatggagcaagccggcaccgggagatgcggcgcgcgacggcgggaccacaggcgggagcacccggcggtgggagcacggcggcgcgcgctggcggcggcaaaccctagcgccgcgtcgaacccatggccagcgcttggcctcgtgaaaggggaacgggaaagaaagaaagagcgaatcgttttcttccgtaatggcatatgtgggtaattttttcccacaaaagccagtgaaagcaggggtaggggctgcttttggatttgtactacactaaaagcagctttggagcaaaagcacttgtggcttttgggccctttggttagcttttggcttttgcaaaagcaaaagcaggttgaaaagcccaaccaaacacacccttaataagtgagcttagcgaagcgacataggacgaaagtcggacgacgtgaagctaggtgaaacaacggactgaactactgaagcaccaggtggcgaaagcccagcaacgcaaggcgaagcaggctgcagccagtggcgaatctagaaaatcgattcattagtgtcataaaaaaggaatacagggtagttcagtcacaaaatatctggaaattccgagaaaatttccggaaagtttccgaccgattcctagttccgacggaaactacccttatcattttcgattccgtttctgagaaaatatttctgaattcatttccatttccaaaaaaactccgaaaaatttcagaccgacagattcccggaaagttttcgtaatattttcacccatacgcagcagctctcgccgagccgagtgtactgccgccttcggcgcacagtagggtccagcccacggcttcgcgaccgtgccctccacgctgcccacattcaccacggcgacgtataacgttgtcttgcttgcacaattgcattgtgttgctggttcatgaatccttttcatgtgtgtgttggtttcatgctgcattctgatagtagtattctcaacaaagagctagcagggcatgcggtcggggatgtcggtggcgacgacgccgcagccgagggaggagaaggccttgcagtactcgtagctgatgtcgcctttggcgcagccggcgatgagcaccgccggctttttccgattgtcatcctcgtcatctccggcgtccagtcgagcgttgatcgccatatggattattacgcgcaccctgcgccacgagcacgacgtgcatgcggatattgagaccagcgatatactcctccacccggccctcgcaccccgccggacaagagctgacggccgtctcgcccggagtcaccaagaaccagagaggggagagaaaagataaagagaaaagaaagagatggctgacaggtgggctgttattttttttattcttttttttctactgacatgcgtgggccatgagcgttatgaaagctgagggactcgattccttctggttttcaaatgttagggaggtgttatatctggtattgcggttaagagaatcgatgtgttatacccagtattgcggttgagggagacgatttaatcaggagcaagagttgaaggacaaattatagacttattccatgccttaaaacacgggagccctcgtttgggtgggccccagttccttcccatcctggagttgtcctacatgcccagcccaatacccatgaaattgaggcccaaatatacagcccaatgaagcatgcaaaaaaaaaacgattttgctatatatttgtcgataaattttcccccaaaaatttgacagatgtaattatagtacaatcgtaatgtaattacactgtaacttgcatgtaattacactgtaactatagtgtaacttgtatgtaactttcaaaaatctctccgtcacatgttatttcggtaaaatggaggtcgtaactatatgtgtgtgctatgatttgttttcttcctcaccaaaacaaatattgtaatagatctaacgattcaaaattatgtgaaacttacatataagttacactgtagttacatgcaagttacagtgtaattacactacggttgtactataattatatctgtcaattttttaggagaaaatttgtcgacaaatgtacagtagtaaaaaaaaaaaggttatcccacatgcgcagcgcaatgcaaggcgtcccaaagaaaaaaggaaaataaaagaaacaatcgtggtcggcaggattcgaacctgcgcgggcagagcccacatgatttctagtcatgcccgataaccactccggcacgaccaccttgatgttgacagccaacaaaatactatacttaacttcttcaagtaaatctttttttttaaaaaaaataaatggtattctcgtgtgtagaagaaacacattactgcacacgagacggttgagcagtcagtttccgggagcaatgttgcattttctcctgctgccattcaattctcctgcaccccaccaatccagcacgacaaacacactcccccacggacccacccactatatatatatatatcccaagtaatccctagtccctactccctccgtcctataaaaaaccaatctgatattggatgtgacacatcctattactacgaatatgaacatacttctgtccaaattcattatactcaaatatattatatctaattctagatttatttttcgagacgaagggagtacatcctaccgagtattctgcttcggctgctccccccccccccggcgggcgagtcgtcaacgaccaatcccaaactctccggccatccaaatctatgcacgtcaataccaccacacactctctgtctctctctcactatcatctcacaacgaccacgccacggcatttcttgattcagcggcgttagttgaaaatttttaaagcccgaacaaatctaactatgttaatttcactagtttcgataacacatctggtttcatttctatatggaaaaagtacgaattactaccctaaactatcgcagtcgaccgaattaccccctaaacccaaaaatcagacattgctcaccctaaactttcaataccgaccgaattacctcccccctgacccaattcagagtggttttgtcctacgtaacatacgcgtggcaatccagtcagtattttttattaaaaaaaatggtgggatccacgtgccatactttctcatctctctttcttttcttaccctcttcttcctatctctctctgtagcgctagtcgtcgggagcagcgacgcagtgaccagcggtgggcatggcgggggcctccgcgtcccgccgcgctgcccatcacccgtcgtgcgtgccgaacgcctgccgccggtcgacccgagcgagagagaggaagagtgagagagagaagagagaggaaggagagtatgacaggtgggtcccacttttttaataaataaaatgctgactggattgccacgtgtaagccacgtaggacaaaaccgctctggattgggtcgaggggggtaattcgtccggtattaaaagttcagggtgagcaatatctgggtttagggttcagggggtaattcggtcgactgcgatagtttatggggtaattcatattttttcctttctaaatctacccagtggctcttgacccaatctttcgaaattcttaaattctttagctggcataagctaaagaagttctcgcctgcaaagacaataagaaaaatcaacaccacctattaccataatagcctattataccataattcgacaccaccttattctaaaaattagtatctgatggagaaaagtcctctttagccgagccaacacgtgggcatcttatattcctatcaagctctcggcctaattcattaattaattcatagcctcgcatgacattcacaagttcattgtagcatggattattgatcttccaaagaagatgtacgatctatgaaaaaaaaattagtgatgccatatatatatgatggctaaacaaactagaccaacatatctcatgtataactaagtaaaaataataatgagggcttccacgatcaacgctgatcatgacggggcttcggtccctagctaccgtcctcatagatccgccactgataatttgcatggtaaaaatacgaatattagggaaggacctaatattaaataattagaatatgtgaggttcaaacgcaggtcgtctagcccaccgtcttgtggagttagtcgaaagacccccaggtatttctcataatttgcatggttagaagactatgagcgtagcaggagtacatacaacacatgaccgcgatggtcacgtcgctgatcgaggagatgtgttgccgagatgtggtggtgtggtctgcagctgcttgtcgtcgtgtcgtcgctggcagggggcggagaagccatggcccccaattgggactttgggagcatcatatggcactttgcgatttgcgacgaacgtcggcgatggatgatggggcgatccaattggccatgcttgcgagcagatgggttgtttctccgtggagttgtagtggtggctttcttccctactgcatcggtgatcaatcattggggaatggaatagttgttggtgagtagccactgatttgatgatgtgtcacttgggatgggatcagatgacagggctccatgtccatctctccgtagatagtacttcctccgccccaaaataagtgcagccatgattttccgcgtctaacttttaccgttcgtcttatttgaaatttttttgaaaaaaattaaaaacataagtcacgagtaaagtattattcatgttttatcatcttataacaacaaaaatgctaattataaaaaaatttcaaataaaacggacgatcaaaattgagcgcggaaactcatggctgcacttattttgggacggaggtagtacaagaggacatagttcggtatactccctccatttaaaaaaaaaaacccaatctagttgagatatcacctagtcccataaatctgaatagttgtttactcagattggttggactagataatatctcatccttaactgggcctagtttttttttatgaagggaatagatatgagagcttcatctaattaattgtggcctagaaaatttgaaactagtaattttttggaaaaaaataaaaccatctcaggaagccatcgtttggctaattttaagcataagcgaaacggcatatttgcaaaaaaaaatgttaataaaatttttatatacgtgttcttagctatctaaaagcaatggctaaaaaataaacttcaatgaaaaaaaccttaagatcaactttaaatttaagattgaaaatttaaattttagctgataagtacaaacatgcataagtgaaaatatgaggccgtcattatggattaggcctgacgctaggaagggtatacacgtaacctatattcatacccaatttttcccataaccatttcataattctttttagactggtaccatttcataattagctttacccatatccatttgctatcttttctatcttccatttgccatagaactcaagcctaatctagtttcatccatcatccatccatggacctgacagttgtcatctatctacccatgtacttacgttgttttcaggggcagttgccacatcagcccacagttggtcgtcagttggagtgacatcatccatcgccaccaacagccgcgcgcgtcgtcgacgtggatcgtcccaccaccaacgcccaccgccttcttcttcttcgggaaacacttttaatcaccttgcataataactaaatgtgtatgaaaaaaattcaaaaaatttaacaagatagatacatatgtaatatatcatcctacaagcatacaagtttaaattcaatttctataagttgtaacaaaaataataaatcaaactctgattagtatacgtatattccagttaaatttgttattttgttacaacttataaaagttaaattttaagttgtatgtttatgtagtgatatattatatcaatctatcttataaattttttaaaatgttttcatgatgatatgtacttaatgagtggacatccactgagtgtttagaatccaccttcttcctcctcctccttcttcttcacctctccaccgcgcgcgcgctctctctgtcttgcgcgcaatggcgtcgtcgcccgccattggcgcgcgcgagaagaagctcgtcaggatctcggatttcctactcctccacgacgacagcgacggtgcaggcggcgccgaccacgagctgctgcggcggcggcgtcgtcgtcgtcgtcgtcaggaggatgaggaggaggaggttgtggcggcggcggcggcgcaggtggcctcgcctccttcgccggggacgccgcggctgcggatcccgggcttcacgtgcgcgcgcttacggttcgtgagtttccgcggcgggaggggaggacgtcgcgacggcggccggaaggaggagctcgccgccgagaagagcgaggccgcgtcgtcgtcggcggatgaggcttcaggttggtgtggacgctcgtgtcgtggttgtgttcttggagttttgacggggtattgatgcgacgtacggcggccattgcaggacgcgaggtggcggcggggagcggcagcggcagcggcgcgtcgtcgtcggcggcgacggcgacgacgacggaggcggccgccgggttggggctcagcctgctgttcctcctggcaagaacgtccgccgagctcaacaagatggccgaggtgcgcgcgcagatggaggcgctcctcagcgagatgagagacgaagctgccatctgcaagcgcaacatcgccgccgccgcgcgccgcgagcttcgcaccacgtcgtcgtcgtcgtcgtcgatctcgactcgtctcgcttcgggatattcgtcgaacacctctagcgccggccgtgcggcttcctcgccggcggccaacggcgaggtcgagatcaagaagccgctgcaggaagaggagtggtcggacgacggcgagttcatcgagctggagggagggttcggcttcgtcgccggcggcgacgaggaagacggcggcagcggcggcggcggggtgtccggcgtggagctggagaggaggctgcgcgaggtgcagcacgagagggacagggagcgggtggcggagctggagtcggcgctgcggcgggcggagcggaggctgatggagaaggagatggaggcgcggctgtggaaggacacggcggagctcgcgctgcagcggccgccgccgccgccgctcgccggcggccggcagtgaccaggccacttgtatgtagtagtgacagtgagcagtgtgttgcttaactctgttttgtcagtgataaccttgtagtatggtactcgtaaaactgagcagtagtagtagcgttagtaggaactgtacggtaacatatactgattatatcttgtgtaagcaaaataatggaggggattattatatttaagtcacatctaatgctaaaaaatttgagtcgaatttgttcttagttggatccatactaagattcgtgctccgattatgtgtggtggtagcgacgacgctgacactatattacaggttagtttttaggcgagggttaaaatagtttaggagttgagaaacgaggaagagggtggtttcttctaaattagaccgagtttagtttcaaactatttttttaaactttcaacttttccttcacattaaaacttttctacacacacaaactttcaacttttccatcacagcgtttcaatttcaaccaagcttctgattttagcgtgacctaaacacacccttagactcatagccagggagacagtatatctttagtggatgacattgacaggcatggcaggcgcgtcagaaccgtagggttaaataaagacggtgagcgaggttagagttgaggccgtcaaatctaaaatggttagaaggtggagggtgatggtggtaacttggcgacgagaccgccatagacaagaaaataatggtcgtgtaggggaacctcgccgcagtttggaggaggagaggaggtgtggatgggaaagggaagggggcaaattccaatagaacaagtctcaccccaacgaggcagataacgcaccatgcttgttagaaatcaagtggcgcatgcattgtgggacagaaaagaagaggggaaatgttactgtagctgttcaaatttgcgcaatttatatatgctgggaaaaactaactttaagtttgaatggcgtactgaggaatggatagtctcaataattagtatgcatattaataggagttaggagtaatatctacagaatcccttttgtttgtatactctaaattcgtgcacatgccctactggcatgctcatttaattccaattaaatttatatatataatattaggaataattttaggaagatagcccacttgtcttcttggcaatcataagggcattaataaggggtgaaagtttggttgaggtaagattaaacaaaaattaaatgaattgcactgcaattttgaacttgagaattagctacaggagtacattttaggatgggagtagtagctatttgttctatggtgcatttgcttgggggagttgagggcatgcgagtttaaagggataaagttattattttcttgcttagttttagagaagaataaattgcattagcggtacatgaacatgtcaagtaggtgaaatttagtgtatcaacttgtaaaatactcattttggtttatgaacttgtctgatacagtaaactaaggctaaaatggcacggtaagacccatttttatatggtgaacattataaattataaattagtagatgatgtgcgtgcttacagtatgtaggttatatttgtaaacttagtttccactttatctttctttgtttctttcccttacactattacttggtttttgtatgcaatcattacaccttattatatgtttatccttattagacacatgttcacagtgagtttaaatcaacaaaattaatcttgccatgtgattttgatgttcttcacacacaccaaacaagtttgtgcatcaaaacgagcattttacaagtccatgcatgcaatttactcttttgagaattaaggagagagcctcctactcccttcatacttatcgtagtgaacaatgctattgttaaattttaaaaactttatctataatggatttgccggctcagttttcgaagatgctcataggggtagggtttacgtacgtgcgttcatagaggtgaatgtgcgtgcgttgtgagtgtctgcgttgtactgtgtaattttaaaaaaataacatctaaaatatttatcttaaaattataaaaactagtattaaaattaattcaataaaatcatatatttattattttttatatgttgtaataaaaaatggtcaaaataatttttgaagaccaacttcttatctaaaccgataagtattatcaactcggaaggaacactttttaatatctagataatgggtgagaggtgagagggaatgccctcgatacatcttacaaatctcagttcttacttgaaatctattacatagaactctcaataattaccaatacttcagtcaaactagaggatgggacttaaaaaaaaatcaaactcatatcaattttaccaccggtaatttctctagactcctaatattctcatccaaagtcgatactccgtttaggtttgtttggcaaatgggataagaaaatagtatctcctgatattctcatctaaaatcatagccatctattcttcacacctcattcaatcctagccattcatccactttctttttttttttctgatcccacatcttataatccatttgtcaaacgtaccctctgttcgaaaatgcaaaaactagccgagatttgagaaaaaaaaacaagtaaagaagttatgtaatactccttccgttttatattataagtcatttagtttttttctagccaaactttcagtttcatattataagtcatttattttttttctagtcaaactttgttaagtttgaccaaaattatagaaaaaaaatcaacatcatctaaaatatgaaattagttttataaaatctaacattgcatatagtttgataatatatttgttttgtgttgaaaatgctacaatatttgtctacaagtttgttcaaacttaaaactttttgataagaataaaaattcaaatgagtaataatatgaaacggagagaatatcgtatatttcgagacgaagagaatatatttttattttgaggaggggaaaatctgatgccaggccggcccaacagaggagaggttctgcttctccctttacttgatgccttgattcctccctttcttttcatcttctcctcctcctcctcttggctttcctttcttccgatccaagctactctctctctcctctcctcccctcccctcaccaagcgagccttctagagagagagagcttcccccggggggatcgagctcgccggaggactccacccgccgcgcctcggctgccgggagatccccccgcccgcccgccggtccgtccaacggtaagtctcgccttcttcgctcctccctgatttctcaccggcgatcgatcgatcgatcgatcccccgcgcgcgctcgagccgtcgccggagcctgggtgggtcgggaatcgcggcggcgtacggagtgagagatggtgtggtgtggtagggtagggtggatggagcacggctcgtcgttgaattaggggggaggagaaaaaaagggagggatttttatgcgtttttttggtgagggggaaatcggctgctgtctcgtgcgagatgtgctgctataagtggcaaatgtcaagtgccggattttcgttttgcgttttgccctggttggggttgggttactcatccctctactgaattggcatgtactactatttcaagctaatttgcttgttagaactatatatgttcagataccttttttgtggctgcacagtgtgtgtgagttttttttatcttaaaaactgtcattagaaggcatcatggcacaacagataagagaagtgcattgccaatgctgcaaacgggattgcggcaacgcaagcttgcagtgttgcctgtggctaatcttgatgatgctgatgatggtgatagtgtctaacataagttctgaacttttcttgtgtattgacaaaaccatcaccagcttgcatgtaattcatcttccatctgtgatagttttgtactccctagttttcttcaccatgctaatttcaatattcttgtttctgctatgctaggaattgaaaggaggtagccttcttgtcagctagtatggtaagttctctagcagaaaattgattttactacagcttcccagtttatctgccgcaccaagttaacttgtggattcggaggatctctttcttgcaatcctttgtttctacccaaagtttgatgttctaatatatctgtaataaatagtatttcgaaggctatggctaccgtggaagtaccttcgagcagacatatcgctgctaccctgcgtctttcattgacaaggtttgtctactgtcttcagataggctccatttactcatgccactggtataatgttagggtggtaaatcaggttgtttctagctttctttttctaatctaaagtatcaacataacatactgatgctatattgatatgtaaacatttcctcttttcctgtccttattgctttgtggcgttgtttttgcctctagcataatatgttgacatcctttgaactgcttaagtagaatctacttcctccgattcatattataagactttctagcattgcccatattcatatatatgttaatgaatctagacatatatgtgtgcctagattcattaacatctatatgaatgtgggtaatgctagaaagtcttataacctcaaacggagggagtagcagttaatacttctaggaaatttcttctaaaaaaagttagaggaaacaatcacatttcaagataaagcatctagtttttcattcctggatatttcttctaaaatatcttcttttttttttttaccctttgcagcctcagcttgaaactggtgacaaaagtatgctctctgttcattgattcatcatctgttaagttgattttggaaattgaactaagtattactttattttcttttcagttattatgccaccttctgctctggatcgtctaggtaagtttagttgtgttagataatctctttcttcttggaaacgcatgatgatgattcatctcgtctgctctcacaagctttccatgctctattttctggtaacttctctaatctattctatcactatgcagcatctctgcatattgaatatcctatgctatttgaagtccacaacgcggcagcagaacggacttcacactgtggtgtcctggagttcattgcagaagaaggcatgatctacatgccatattgggtatggacatgtttagaataacgttgcaattacttttatgcgattccaccaaagctaactctattactcatcagatgatgcaaaatcttcttctaacagagggggatatggtgttcataaaaaatgccaatctccctaaaggaacatatgtgaagctgcagcctcacacaacagacttcttagacatttcaaacccaaaagcaatgttagtattgtttggtaaattattttctgttcttttcttttgctatcacttcatgtcttcatatactattgtgttgtgattggatcttatggtttgactaatgagatccctgaagaacagtaacaagccatttatgccattcttgcagcttggagaaaacattgcggaattactcttgtctaaccactggtgacagcattatggtagcatataataacaagaaatactacattgatatagtggaaacaaagccttccaatgctatcagtattattgagaccgactgtgaagtcgactttgctccaccacttgactataaagaacctgagcgacaaaaagctgctgttcctccaagtacagcgcctactgctggtagatttctctttatgccccgttattgatcttgatctcttccctcagattctcttgctgttcattactttaagatttattcgttttgcagaagaggcagctgaagaagaaccaaagttcatcccctttactggacctgggaggcgtctggatgggaaggctcctaaagataaggatgtatcagcttcatcccctgcaaaacggcaagctaatgcaacaaacagcgtgcagccctcaacagcgtccacatcacagagcagttcatctcgtaaaaccacggaaaagcttgtttttggccctggtgggaaccgcacatctaaggaaacagaaaaggttggtatttttgcaatttatgcacctattggcagctgtctggaaaacgagtgctagttttggagctacttgagatgcaagaacctctagtgaccaatgttatctaaaacagctctgtcgattagagaaggcataataagttattgcttcgatgtgtttgacacacttttttttaccataatttgttttattttcaatgtaggtgcctgaaaaggaaccgaaggaggatcccaagaaagatgaaccgaaattctcagcttttacaggaaggaaatactcattgaagggctgatagccagatagtgtattatcacttatcagtatttccagagacagacatgattatggagaaggagtttgattgtttagttacctccttgaagcctcttttggttggaccagtggcatctttgaatgtttaatttctgtcttaactatgaatcatcctcgtgccagcaacggagaggcaactgatgtataaaaaaaatctattcatgcctgtttatggatttgtactgagcttgtctgtacatatgtactgttccccccatttacttgtacgtttacctggtgtgtggcggtaaaagttgtggatgcatgctgcatagattcgcacgtttttgctgctttctctctcactgggaaggttgattctctatttttttttcatatgtcatgcaacaacatctaaggctgaagcacatgttgccaaccactgacatcaaatgctccagataatttagtgattcataatctcatccagatctccacagattctgttggtttcggtgttaccctcatgagcaaaactcggtttcgtagcctgaattgcgggttttcccagcggcttctgtggatctgtcacatggaaatggaagagggctgaattgtgaacgatctgcatggcaactttgaggaaaacttcgaggaagggaaaacaccttgtttgcgtacgtttcccaaactactagacgatgtctttttttaataaaattttctataaaaaagttgctttaaaaaaatcatattaatccatttttaaaaattaaaattaatcatacgataatgacttacctcgttttacatatcttctcaatcttctcttctcctctcaatccctcccctaaaaagagcttagaagagagagttgatggcaagattcgttatgagagtttatctttagtccactgtattgtttctaatacctctctaaaatctcttattttagaatggaagcagtagtatttaagaggcgttttggtattttaaacacttacaattctaccctattaaaatattggtagtgccaaaacttatctagagtttaacactaccaacattttgatggtagggtactaaatcaaacaagccttaagttcacgacggacaaccaaatttagcttgctatgctatacttagtgaaaacagaaaaaaaaaagaaaaaagaacatcgagacatactagttaccttatgtgccgaaaggccagaagaggcggtgtgcttcaaaggatagcaaagcctctcactctactagataagatagcaaagggagaattggatgccaagagaaactaatatttacagaacagtttaactaacatcctttgcaagttacattcttttcaactggacagactttctatagaaagccatatgaaagctcagaagtgggaacatgccgaactagcagctcctgcagctgctgaaaacatctactacgagggggaacctcaaacctggtacaggatttggcgatgccatcgtgtaactaactagtcattggcgactaactctaagtttgcattctctaacctctggaggacaagcttcttctgtggagcaaggcctttcgcgatcgccacggagctcacgtcgacgaggacggtgtcgtcttctttgaagtcgcccttcaggacactgagggcgatctcgttctctaccatctgctggatcaccctcttcacaggcctagcaccgtagttagggtcaaagccgagagagccaagatgctccacagcttctggtgtgtactgcagatgaatcttctgttgcctcagccggttcttgactcggttcagctgcaagtggaatattttacaatttttttgttagatcaactgtgagaaaacctctaaagcacaattaatatttgatgctatggcacaggtgggtctattagagtagtcatgtaagaataactataagaggtttacctggatctccacgatgcgatttatctctgtggtgtccagcggctggaatacaatgtactcatctatcctattcaaaaactctggccggaatgactgccgagccatgtcaatcacttgcttcttcattatttcataaactgcctccttgctgtctgatgtgtttctaagcgtatcaagaatcaatggcgacccaatgtttgaagtcatgatgataacacagttagtaaagctgactgttctgccctgagagtcggttattcttccatcatccaaaagttgcaataagatgttgaacacatcctggtgcgctttctcaatttcatcgaaaagaaccacagaataaggcctacgacgaacagcttctgtcagttggcccccttccccataaccaatatagccaggaggggctccaaccaaacgggagacggcatgcttttccatgtactcgctcatatcaatccgtattagagcattctctgtgttgaaaaggaattcagctagtgttttccccagttcggtctttcctacacctgttggacccataaacattaagcttgctatgggacggttagggtctgataggcctgccctagaacgacggattgcattagccactgacttcactgcaatatcttggccaataaccctcttgtggagtacatcttccaatagcagtagcttttccttttcagattgttgaaggtttgacactggaataccagtccacttgctaacaatctcagcaatgtcaacatcagtcacctcttctcgaagcattgacttgcctgactgctggaattccatgagtttgttctcagcctcttcaagctgtttttgtagcgacagaagtgttccgtacttgagctcagctgcacggttcaaatcatactctctctcagcagcttcaatctccaggttaactctgtcagtctacaacaaagataagaaaatatgagttagagactatattacgtgccatggcacaacaaataacaattaaaagaacaaaccatgagcctacctcttccttgatcgatcttatgcgagtcatcaaggacttctcatattcccaatgttctgaaaggtttttctgcttctgcttcagagattctagatcagcttcaagcttgctcagtcgctgtttggaggctttatcggtatcattcttcaatgagagcttctccatttcaagccttatgatttccctatctacctcatccaattcaataggtttcgatgttatctccattttcagcttagcagctgcttcatcaactaggtcaatagctgcccatgacgtggaagaaatttagatcaagaaaaactgtagaaggattaaatttaagctcccataattgttgataataaagaacatgcagtacctttatcaggcaaaaaacgtccagtgatgtagcgatctgataaaacagccgcagaaacaagagctccatctgatattttgacaccatggtgcagttcataccgctctcttaggccacgcagtatagagattgtatcctcaactgctggctcaccacaataaacctgctggaacctacgctccagagcagcatccttctcaatgtacttcctgtactcatctagtgttgttgctccaatgcaacggagttcaccccgacctaacattggcttcagcaaattaccagcatccattgccccacctgctgctcctggagcaggaaaaaggtaaggtgtaagcacaacaatagtcatagtaagaaaggcccgaccaatttgccacaagtgcagatattgggcaaaatagttaatgacagcttcaaagtagcataataagacaaataaaatgagataattgtctaaatagaagcactagtgactaccaatctaaaagtcagacagtatcttccaccacatgagtatgtatgtatgcttaatttgaatcattcagccaatttgccactagtgcacattttgggcaaaatagttaatgacagcttcaaagtaacataataaaacaaataaatgagataattgtctaaatacaagcactagtgactaccaatctaaaagtcagactactatcttccaccatatgaatatgtatgcttaatttgaatcattcaggtatcaaatttagttaagctaaacatgtgacacctaatggacaattcagaggttaataaaagctaagtgctaaacaaacatggcaatggccaaatacacagatatacaaacctgcaccaacaatagtgtggatctcatcaatgaacaagatgatctgcccattcgaggcagtgatctccttcagaacagccttaagtctctcttcaaattgaccttggaatttagccccagcaagtaatgctcccatgtccaatgaaataagctgtaattttttgcatatgcatgtaacaaaataagaatggatagcacaataaattactatctatttcttcttcctttattttctcattgcattaacgaactgagaatgcattgtcctattggccagaagtattcctcttaatggatccacctgacgagaggtagatgaattgccactactcatggaaagatctcatggtatatctatcctcagctcatctggttgattgaatctgagtatgaaataaaagcaaggctactatcctagaaaatgttatgataaggacaagcaaaaaaggctaagaaattacctttctattctgtaaaggttcaggaacatctccccgcacaatacgctgtgccaatctgcacgaaataaatgcagacgaattgctcagcacatccttaaaatgacaaatgctgtaagctgtaaaaagtaacttgtattgagagagagagagagagagatagagatagagatagattttacccttcagcgatagcagttttgccgactcctggctcaccaataattacaggattattcttagttctcctgcaaaggatctgaatgcatcgtcgcacttcatcatcacggccaataacaggatccagttttccacgtcgagctaattctgtcatgtcaataccatacttctctagagcctggtacttcccctccggatctggaagcagcaccataaaaagagttatgattcctaaggttatcaaacagtcacactgggtacattttaatgctaacatgaaaaaccatctggctgaaacaaaaccattgccattggcagagtctcccctcaagttgtgaatagagagctgaacaaagagatacctctgtagaaaaacaactgcacaaaagaaagtaacaataaaggatgaagttacatagacatactctgatctgtgacccgctgactgccacgtacagcggagatagcttccttcaactcattctccccaattttgagatctctgaacagctgttgtccaaacctcttatcttctgtgaatgctcgcaatatgtgctcaacagatacaaactcatcagcatattctttcttatgcttccttgcattatccaaaattgatacaaagcttgacccaatgatcggtccacttgtatcgccaacaacctacaaatgcagcagactcattgttaacattgatgcatatatctcttaacgaattaactactacggccaatcagcactacctttggctgtctcgagatgaactcatcagtagcttgcaggacagatgtgttatctattccagctttcgaaaatattctgcgcgctaaaccatccttctgctccagaagagctttcatcaggtgctctgcttccactacttgttgcttcgacattctagctgcatcaaccgcgccgacaaccccctcccaggccatctcagtaaattctcctggagttatctgtttggtcgccgaaaaaaattacccatctattagtcagctgttgttggcaagagggaactttcccatattgtctatatatgactatatatccacaaactgcaaaccatatgttctcagttttcatagtaatcaccaagttttatcaaatctgatacatagctgttctcagttttcaccaaacctatagaatgatcagcaactgctttccttcaaggttttctaggcatgaaattgttaaacactgacacattgcacatcctaaattgcctgaaactaaacacttttgcatatgcactgcaacatgatcactgagcatagcagaacattacacatgtaaaccgtagtatccaattaatgcagtagattatcaaacatgtatcgcaaattcgcaactaaactaacagtttcattcacaatagcctcattgccgacacatgtacagcatccgcgagattgaattcaccaccactatagcaaccaactgacaagagaaaaataattgcacgggcgtagagaagcgaacccagacctgagacgacgacgaggtgctgtacctcgccgcctgcgtggggtggaacagcctccgctgcggcggcggcggcggaaccagcagcccgcctccaccgagccggcccatgggcggcgcgaaccacgcgggcctcctcgccccaccaccagcggaagcggaagcgtctccagcgagcgacgcgagggcgcggagcgggtcccggccgccagcgtggtggcgccgcgccgccgccgcggcgcgggcggcgcgcgcgagcctggacacggcggtggcgcgtgacatcgtggcgagcgggtgggggggtcaggggttcaatggcgcctcggactctcagggtcgccgggtgggagaagcgcgcgcgctctcgcggcgattttagggcggcggcggcgaagggtggcgatgcttggagaaggggcaagaagaagaagaagaaggtggagaagagaatcgaaggttggagaagcttctgcaatctgcaagttgcggattgttttgtttttgtttttgtttttttcttttttttatttaatttaactttgatcgtgttcggcagccaaaatcatcttatccggcccgtttatttccgaatcgacggtctgaaatttgggcccatatgagcagggtttccaacttgggttcgaaatttcctccctccgtttcatatctactttgaccaaatttgaaaaaagatttagtaatatttatgacaccgaattagtttcaataaatataatattgaatatattttgagagtgttagaaatattgctatatttttctataagtttgattaaacttaaaaagttcgattaaaaaaatcaaaacgatctatgatatgaaactgaggtagtacactgtacggagctatttcgtccaaaatttgcaagatttattcaaattcggtcgaaattcctccaaaatttatgtttcttcgtcccgaaatatggagaatttggttcagtaatcagttcaggctgtagttcaaaagcttctcttcagaaatctgcaatttcaatatacgcagctcaggtcttaaccggacacatgaatttttcccatcttcacaaaactgcaaaactaaaacaactacctttccaaacagcaacattctgctgaaatctcataagatgctggcattgcaactttgcaagcttgataaacaccgtcacgaaaaagattaaagagccaagagaatttcgatgattaacgagaattttaccaagcatactatattatcaggataaccggttatacctgaactaacatagttattatagtataagtcatgataaaaacacaccacatagccgtttctccacataaatttcacagactgactggccaactaataatcactaagctgaaaaaagaagccaaatgtgaaatgcacttgtgatgaaggctagccactatgaacaccactttgtgctgacaagtgagcatggaccaatcagcagccgacaccgcgaatgcagaaaaacctcgtacgcggactaatgattgaaatggaggctggctagaccagctcccagtccccatcgatgtaaggaacgccgtcgtcttcgcggtcctgcatcgatgaaagatggcgttgtcagatacatagtatactcattgtttgtacttcccagcatggcagttaacatattgattaagaaatatgtggtactgaaactaaacttagaaatctcttcagaacgaatatgaaatatttcaatacatatgttgctgtttcatactataataatatagtgcagactgcaaaggattaaaggtggtactatgcagcagaaaatatcttgaaggaatcaaacatgaacatgcttgtggactacatatgaatagagatgagtaacgcacatccatagaaaagtgagtgtttgatagactactactgtgtccagaaattttcataggtcactaaagactgatctgcttgaacaacacaaagcaatagaattctgaaacagaataccaatatagaatactcttctaaaaaataaatacaagaaagaatcataccggcctaaacatgtcaacaacaatgtcatctagaccaccactgagacccctttgcagcccagttgtccgcataagatcgtcattatagtttagctgattgctaacagcttggtgatgaatccttccatcttgcatgggagaaacaatgcccgtattcccacgatccagtgtctgccttggtacagccggattgtctaagctaaggttgggcaacgatgtgttgatgctggagttactaaatacatggctgttatttagcatgtctcttgagtttgtgctgcttccatagttgaatggtgatgtgtcctgattgaatgctattggaacattgctagctagtgatgctacttggccctgcatctcatttcccagcagcggaatctgattggatgatgtgaagcttgagacaggttcaattttggggccattcatatgcagggtggcttgcgacatgttatcattgtgaccacgatcctgaatgttggatggaaccgcagtttgccaagtattggtggttcttccaagatcaggaaactggggagactcaccaacaagtgtgctaaatggatctgcagaagatgaatgcacccgactaaggtgttgctgattgctcgactcaagaggttgcagtgatctgtttgcagttgccagcggtgcaccattcgatatgtttggaaaggagttaccagaaggaccagttagaattgttgacatctgtgcacctctgatcatgttaccattattaagccctcctaaatcattcagtgaagtgctcagattattttgggcatgtcctaactgaattggctgtgaatgcagcaaaccatgaacaccaaacgcagaaggggagttcatcctagtaagaatgttgtttgcctgggtatggccagcagttgggactgtacggtatctaccatatgcgttgtagtttccaaatgaattcatgtttatgtaagcagggttccttcctccaaatgcagctgcaaggttagcctgcctgcttgcatcagtgctcaaccgtttaaggtacagccgatacttctgaaatgacaagcagagaagaaacatcagtgaagtatacttgtaggtgcaaacaagaggaaaaaaaatagctaagaaatgaataggttagcaaaactctgaatttaacactggtgaattagtacttacgattgcacaatcaatatactaggaaaatggtatgagaacataaatgttatattttgcttctcgtacaaatactgaaaaagaactcaacaaaatacagaacatgcaacaatatgaattaggaatattttagggctgtattatcatatattaaaaaaaatcctctttcagatatctgggacaataataacaataatttggtgcagtgataaaccatagtaaacaacatgatgaaatgaacggtcaaagataaggaaagaaattcgacctgcaaatgactagcaacattctccctggtgatgttctctacattcatgagatccaatattttctttggaacagcctctgaaaaaacaagcatacaaatattaacacatatgacattgaactaagaaaaatagccagccaatattctcagtagctaggttgtgagaaattatcttactctcgatgccaagctggttaacagcagccacaaactttcggtgcagctcaacagaccacacgacccttggcttcttctgtgttgatgagtctccattctcattactgttctcatcagaatcatcaccatcatctccattctcatctctacttttccgtgactgcctcttgttgcggttagcaccaatactctcaccttcattgttcattccctgtgccttctgaccagcgtcatcatcgttaccacggttcttagcatcacaattcttacgcctaatcacatgttgccatatcgtccttagctgctcaagacgcactggcttcagaagatagtcacatgcaccatgggttatacccttcatgacagtttgtgtttccccgttcgcagacaacactacatgacagatagtcaattcagaatgtaaggtaaggttcatgaatgcagtcaaagtaatgttattagatccgcgttaacataaacgcaaacatcgttggtcgacctgatgtttctcagtcagtttgcaggagaacgttccaaataaatgtaaaaaaaaaaaaaaaaaactggctgagaagtaagaggatacagcatcatagtcatttgtgcaaggcaatcagggtaactaacaagagcaaacgtgacggtatctaccaaattttcgcattaggaaactttcatcggttacctgacctacgcaccaaaccaacagtaaaacagaaaggagctttccaaaaatagatttgaaccaagaaatttcatgagttttccatgtctcacacttgttgccattttcagctaactaccttattgctataaataatcatgtatctgcaacccaagcagttcaaatgaagtaaaatcactcactagatgtctagatctcatgcaatccacacgcatcttactagaacatactatctctggttacaagaatgacacatcagatcaagcaaagcatgacttactaatgactgggaggtccatctcgaggccgacaagctcaaggagtttgaagccatccatgtccggcatgtggacgtcgctgatcaccaggtcaaactggtccttgttctccctgagcagcttcagggccgtggccgcctgaccagttgttgtcactgcaaatcacaccacatcaaatccaatcaggccagattcaacaacacaatacataggcaagtcaaaattatcaaaagaattagtactactactattttgctgcaacaaggaaaaaaggtcagcagaagataatccttacacaaccaccatgtgtgcaacccaaagaacagtagaaaggattggagattcagacagaagggttgaaattatatcgaagaaaagagaggggaaaaaaactttttttaagaggaaaggggcaaaacccgttcttgagttgacattacatggccgaagaaatagaccaccaagaacaacagaaacatctacgagtgaaactgtgaaagccaagcaaagaagaactagcgcatcaccaaaaaaaacaaaaattaaatccaagagagagagagaaaaaaaacaactatagaacagtactaaaccaaaacgaaaaaaaaattgatcgatacagcacaagctcaatccacaaccatggagagaactcgctcgctcgctcgctcgagctcgagagagagagagattgcagattagcagcataccgtgatactggcatcgaagcaggaggttctcgaggatcttgaggcaggtggggtcgtcgtcgacggcgagcacccgcatgccgaccgggaactggtctctcccgccgccgccgccgctcacaccatggcctcccaccctcccctgcctctcctccaccgtcatcttcctccaatcaatcaaccaatcaatcaaacacaaacaatctcccaaactcctccacctccaagcaacccaagaaacagcactttcttggatccttaaaaataaaaatccaaaggtcaaagcagggtgagcgagagcgagcaccaccaccaaagagagagaagtgcgggatggatgcgatgataataagaggagaggagaggagagagagagcgagaggtaggggatgatggatggatcgcggattgggtaaatggaatggattggagtgaaagagaaaaaaaaaatttcatatgcagtgcaaaggtggaaaccttttttttttatttccctcctcgcctttattttccttttacgcttcccctgtttcatgccatttattcgcctctttaaatccgtccatcaaatatggggctgtgggtcggggcgtgtttcgtgtttgtgctcctttttttgagagagtttcttggtcaccttttgaatttttactgttactgtttttgcatttatttggtggtggatatgggtcgtatgtgctttgtttaatttggacttaggtgaaatatgccgtatttgaaattcgcacgctttatagaacccgaatcggttgacatatagtaagatgatgtgcgtcactctaatgcctcttaagattctatatttcggtgtagggtttaaatatttttttccaacaagcatttatatgtatatatattttgttatgtaatcacgactttaaaataacgctagcaattacgcgacacctattcggagatgtgggtaggtgtttgtactctctttaaatctaatatcaagacaccttttgaattttattatttttcatctatttttatagtagatataagtcttatgtgtattacctatatgattttatcatatatatgcatgaaaatatgtgataaaaatatatacatgcttgaaaacgaatcggttagcatatgatttgtttacaattacgatgcctttaagatttttcattgtataggtaaggtttcaagtttcttttccaacatttgtgtatatgtatttgttgtgtaattgtggcgttagagaaaatgttactccctctgttttgggttatatgactttttagcatgctagaaagtcttatgacttgaaacggataaagtagctcgtaattcaatcccgattatctactgtattgcataggcatgtgagcccgagggtatgtgagtgatcctcgttcctcgcaattacacaactggttagggtggaaagcaatagttttggcatttctcaatttaattaattagtcatcatccaggcacctctttttctcctattgttggtgctgacgtggcttgagctggcctttgcggctggtttatggagtatataacttgattaaagtatattggtgataagattagtgatgcttgacagctagatgttacatccatgcccgtcttctcccacttaattcttcctctcatatttcttgcatgctaggcagcacgacaggatcaaagattcacagatctatatagacacgcacatatatatactatctctcatagcttggaaggaaggaaaaacattttaattagctgttgcaatcatccctaatttcttcagtttggccctagaattaaggaaggcatctaaattactgtgagatgtacaatttttttcactcaattttatcctatccaaatccttccctttgttagttttccatatagcaaaactcctaattccaagacatacgggtagagttcttttcccatgaaaaaaaatcatttaactatggataaaatttcctttttcacttttcataccctacataatctttgcatgtactttactgaaaatcttctaactgaaatagctgttgatgattttgctaactgaaaactaaagcaaaatgacctactcctattgagtattgaccttcccatattcctgcagggaatggccaatcagccgccaaaaaacccataaacaaatttgcacatgaaatagctggggttgtttaatatgcgtatacgttgtccttgcatcttatattatactgccccaagtacgtgagtgatcagcagtacattattggctcacacaccctgtgttttgtactttgtgaacaatattctttaaatttattattgttcctgcctttttaattttatatgagtattagatccgtggcaatattctaaggtatcagtacacgtcaacttgcccttaaggaatctcatcttgggcacaagagagctgtgggtgatttcttttttataaatctcatcgattatttttttgtaattaagtagctaaacacatagaaaattcgaagaccttaattataatgacaatgagaaattaaagctcgatcggatccaacaacgtgcaaattgttcgtgagaagaagagttatggtatcaaagtactggccacgataattgcgtaattaaggagggagcttgatttgcataaaaaattgtggcacacgcattacatgagaattaagaaatgtagaattaaaatatttattatacattcacaaaagcaatggacaaaacaagtgatttttgcatagctgtgtggattaattatagtatgtggtgaataaatagttgatgactaattataaagaattatatacatgtgaaaaccaataataaaatagaagtgtgtagacttcacctgctgtttgcccctataataatccaaggtatattttaaggacccccactaacccaacatatccatgcaagcaaagatgaaaatctcaaaggctagcaagtgtgctacacaaagtgccaattaagacagctcctgatctcatctcccacaactaaggcctgattttttttgtctctaattattttgtctatcttcctactcatggaccacatattctgatctgttttgttttgttgaatcctaagaccaaacccacccaaaatatgccccccatcctatatatcatacaacctagtgcttcgacaagttaatgctagctacaactaagtaggccaatgtcacatctaatactagcccatatattttgtcatgatatgtaactttggtcttgcatccatttgttggggtccctcccatatttattccaagtggcaccatgtatatataggtcttcaattcctttgtgtatatctgtcttttagctctccttacttttagcaccaacacaagtatgagaaaaaagagatatggtgcacttgaacaaaatttgaatgatggagttcactttaagtgcattgcatggtctagctcactccccccatgttgtgttatgtctccatcatgaaaagccatcttttgcccctgagtacatgtgacatattcctatatatccgaccataatagcaactgtggctttttccaaaaaaaaaaatgttgttgattgaaatatttttaactattatggtgctctcatgtcatttggaaaccgaaacaaattatcagcaaggttttttaaaagcaaaaagaatatggattttgagcttgtaagttaagtatggttcaatgacatgatatcctcgttcttatgacgcctcctcttcatttccacatgtcataattcgaatacacacaattaattaacctttttaaaaaattaacatctaattcaaacggaacatatataatacacatgataactttgctagatttttcataagaattatgttgtcgatgaattttctaactacatccatctcaaaatattaaagtacaaagacagctaaaacatagtagtactatattttaggatatagtatgaaatacatataattcttgctgatataattaattaatgaagtgatggccagaaattgggtaaagtactagcactagctaaagatatctacacagccaaacctgacatgtattagtaaaaagacgagtaaatcaaataattaattaatcaatcaatcaagaaaaaaatgaatggatccagtaccttttgtttaccactctagcagagctgcgagtttgcattgacctagagagaatgcagtgctgatgagtaggagtaccaattcgtgcatcgtcactctctctatgggacacagctagctataacaacattcatgtcagattgggctagctaccaatgctgcttttgagcaccccggatgtgtgtactgctactaccaagaatggcctccatttcttttcctttctctaattaatctggttgctttgctttaagtttgcttctttcaagaagacactgattcctactagtatctcaaaaagaaaaagaagggggaaaaatattcagggtccataactaataaagtggtcagtattttggtgcaacatgtcagataaaattatggtcatttcctagcaaagttcagtcaagaaattactccatttttcatagagagagagagatgcagtacaatattttttgaccaataaatactgtatactcaacaagagaaaaagcagtttcactactgtcaaagctgcttctctgatctctctgctgcacatagtagtaatgttactattataatatctggaacagagcagtgctcggtttaagcctctctgattagctttaaaatttacagtgatttttatgagctactgacccagtcagccagccaggagttaatatgagccagggatcagaagttcagaacagagaggctcgtgcatggtcatgcactcacgtactctactactgtagtctactgtatctatctatgagactatggccgtattgcattttttttccttatctatgagactatgaccgtattggctttttttttttctttcgtaatttgagaatgttttttttacttggtctctatatccaaccagatatatgtagcctttttaaactaagaatttagtctatcaaataacccaatatgaaattcgctccagtggagatttgaactcaggactttggggtgctagtgtgctgctactcaggtcactgtaatcactaagctacatgcactttcaaaaataatttatgtatgaactgtaagaaatatttttatcatccttagtttacatggctaattaaattacaacggtttgtagtgataaagtatacctcgagtacgtaacgtagcaagcaatattattcatacacagagatgcacaggttaatgactagtagcactaaaaatcctttctcacataacaacacaagagtactcctactatcgtaagaaaaagttttatcagccattcagccttaattcacaaggctaaattacaacggtttgtagcaaagaaagaagaaagtatacctgtaatagtaccattgtactccctccgtactcgtaaagaaagtcgtttagaataatgtttaagtcaaaccttgggaatataaatcatgaataactcctaagttgttgagttttaaaatgtaaaaattatatgaatagatttatcttgaaaaaaaatacttttataaaagaatacatgtatcacttttcaataaatatttttatagaaacaaagtcaaaattgtgttttagagaccgtgtcgttaccctaaacaacttcctctatgagtacgaagggagcacgtaataagtctaatcggctcaaattacccttgtacaagaaacatggccattgcaatggctgcaactgtgcaaacacaggaaaagggtatcgaacatgcccaacgtagccatcatcgttcatgcgcaaaaccacaggttagtattaaaaacattaaaagtactcaaatatttttatatttgcaaaaatgttaataatacgaattatcaatatagggcctgttcggtggccattgctgcggctgcagctgcagccgctgcaacggtacatacgttgttcagatcgctatgatgcagcggcaacgctgcattgcagctgcagccacgggctgccgaacacagccatatttgttaaaaagtcagtggtgatatattatttaaaaaaaagaggtattaccaaatttttgtaagatagggtgaggaggccagtgtttggttcgatactttatcaaattttgagagtagaaacttatagaatcaccaaatgttggtagaattatgttggcaattgtatattgttcattgccttaccagagaatggtaagaagtgaataagctcgaagattttgtagaggccattactattaaacttgctcaaacgctgaaactaatctttgctattaattgcctgatacgaaattgaattccggttttgtacttgggcgcagtactactacagtacactactgctgctgcactatcccatgttaaactgcaagcaagtcagcaagtgcgcgtgtgtgggtgggcccacaaaaaaaacgaagctagagtgtgggggcccgtagcggtacgcgacaatgggtttggggggcttgtacgtgggtgggtaaagattccgtgagaagattccgcactcgaataccgcgtgtgctctgacatgtgggccccaccacccccaacgtttccgctaactaatgggtgcgctttggctgccacatttcgccatttttttttctcttttttgctatgcgcacacacgtctccagctatgctctgtttcatttcagctgctagctgctgctgcgatgaaagttttaggaaaaccctgttcattggtaatgccgttttcatctttttccacgtaatcttaatctcaaagggggcctatgattaagattgattaaggagcacctaagacgaggaagttactagtatatgatcaattgattttttcaattcttgtaaacttgaaaaatagatttgtttaatattttagtccagcttctatatagtattttttttttcacgaaactcaccgtctagcctttaaaaaacttgctaacataaatcgaggtataacctacatcttaatcagaaatgaatgggaccataaaaatgctagtagtgtacattttttaaaagaaaaacaaatgatgcatcaatgtcacaatgtggttgttttatattacaagccatgtaaccaaaggagtaaacatattgtgttagttgtaagaatggtcttataggttgtacaacagtacaaggtcataacgtcaatatgccatgcttgatacggtagcaaaagccaatggcattcatatatgaagcataacatatttcatccgagggatacttcaagttttgtaagatatgtttgtagtttaagaccgtttagagtcatttccaaaattcaagaccataaaagtgaagggataatttggacaattccatcgtaacgttacacgagttgtaaaaataataccatcataccattcatatgtgagaatggcaggcgggaccaagacagatatgtcaatgacatgtacaatggtattttctaacttcatgatttttgtgatggtaccaacaaactgtaaaaaaaagagagaaaaacttccacataaagattactagtatgtttccgcctatacaacaacagtggttgaaatacatacatttctcatgctctataacgctctaaccctaaacccttactacccccaaagtgtctttttctattgcttctccctaactccctttgtgcgcctgtgcgtgtgatatattgcccatcaccaatcatgcatgatgatgtatcgatcgttaccaaggagccagaccaaaatgtacctggcgctcacatgttggccgagatatatattactagctacatgtgatttgtgatttgtgagctatagaaagctagctagcttggcttgtgtgccccactcagatggatcaatttcacctagtggaatgtataattggaacctgcactgcacactatctattgtactatatatgttgactgatgaagaggcaagggattggtgatggctagctcatgctgcatataattggtccaagggatagatgccaacgttagacttattaataaccggcctttttttaatccttcagggtagatcttaaggtttttgttattcactattaattacttcctctgatttttaccatatgactttgcgtattgagttttgacatacattttactattcattttattaaaaacacgtaattatcatttattttagtgtgactttttataattaaagattctttaaacattacttatattttttatatttacataaaggttttgagtaaggcgaacgatcaaaacatatggccaaaagttaacaacgttatacattgaaaaccggaagggagtaattttcttcctatatgaatgtcatgtcatgggttgttaatgattttgctccatgttgcgctacgacgtgtggtcgagaccatcgttgatgcatgcgcaacaacactcaaatggctgtgttgtcaccaccaacaaccaatgccgctgtcatcccgatgaggcacggctagaggtagtaatggatctttcttctttttacaaaatgtgagggttgggctaaaaaggattagactaaaatttagtttttttaaaaaaaatatttaagggctaaggtaagttatgaaaggacccatgagttctgacccattaccacccctgcacatggctccatgccaaggcatcaccttccgtaggcgaggttgggcagggcatgtgctcccaattctagaagggccacattggtacatcacgagcactgtataaggggttactgctatccgttgatatcatcgacaaatcgtgataaccaatcaacaggaacaggtgaacttcgaacaaattttaccaaaagatttaacttctaaagattttatttgaacttggtcgaattgttgcgaaagttactgacagtaacgcaaatcctgaatcatgatgacgaggtatggtatggtggcgcccatatggctatttgcgatgaaatgtattcccatgacgtggtatggatctacagattacatctgcaaacaattcaagaatgacggtttctttttcctcttaccagcgaattttccacgatgtcaagtccaatttaaactaggtttcaaaaaaaaagtccaatttaaacgtacacaacagtaaccagcaaataaattaaaggatggagacattcgccggtaagggtcaaggagatcacaaacaacattcatcgatcttatcagtttcgctttgtcttcatcgttgcagtgacctgcctgtgaccaacaatggaattgtatgcattttaccccgtgtgcttgactgcttgaataatcaatcgtgcgtgactacgtgtgccgtgtacgttccagatagaaatttctgtgaaaccacgtgaaagcattcaaaatcactcgcaaaccacacgttttaaacaagatttaggtctctttcaaacaaattaaaaaaatcataggaacactagaatattttcctacgaaaataatacaatggtatcctttgaaacaaattattgtttcctacgtgaaattaatgggtcattttagagcaattctagaggaaaatgagtatgatgtctctcatatgtttttctccctcatgtatctagaatttctatgtttttcatgtgctaatcaaatggtagttttgaaaatccttagaattccactgaatatgacattatattcctacgtaatattgttcttttattactgtatttttattaatcctgcattttaaatgagcccatagatttatgctagtagtactaatccctccatccaaaaatgatcatcttatatatttacccaccaacgccaaagataatttaaactgtattaatcaaaacaccatgcatacattctcccacaatgcatgcatcgattaaaccatcacgtcaattacaccctagcatgtacgcgttctcccatgtggtattaattgtattcaaataaaatacgtgtctatatagttatataatgattaatttgaaaatttttggattctattacatgatgatcaatttgggaatgagagagtaagtgaacataacatgggaggagtggagacgatggtccccatcgtttggcttatttcctaataagccaaaacatagcttattaggaaataaaaataaatttgtgggtaaaacttttataaatatgttttttgtgacttaaaagccaatgttaaaaaagaaactacgttaaaaatatgtcaaaatcaatattaaaattaagcttaaaaatttaaaatttggttttttcttttagaggccatccgatggggctggatgaagagtagcttgcggtgagagtaaagttggcggtttgctggtttcctggaagcaatcattgcttgaggcttcttgttgaacgttcaacaagcttgtctcgagtctccacacaagggagaagaaggggaagttgcatgctgcgacgactacaatttcccacggtgacaatcatggccatggactcacgaatctccacgccacgtcggatcactctctcgtactagcagtactcctttcgtcttattttaagtgaaattatagtttctgtatctaattttaatcgttcgtcttatttaatttttttataattcgtatttttttattatgagatcataaaacatgagtagtattttactcgtgacttatatttttaaatttttttaaataagacggacgatcaaagttgaacgcgaaatttaaaaagggacggagggagcactattttttaatatattatttatctcttcaccctaaaatacatatagcatccacctaaaaacccttagggcacccacaatggttatctataagctctctacaagagatccatgtcagcatattttcctacttggaagagattaaatgaagagagagagcaaagctatctactaacatggagatagtctatagagaaaaacgaggcaatggattagagagctatagatacccatgtagacataccattgaagtggtttactattaatctagtctattattgaggtgtacatgttttatagatagcaccttactttaccattgcgggtgctcttatattttgacacgaaaaagtgcttcgacaactacgaattctcggaggttggagtagtcgttttcatctctatggtagattggtggtcgtagcattcgatctggccaaaccaaaaaattcgttccagcttcggtctttgagaaaattcggccatcacgacagaacgacatggtcgagctgaaaatccaatcactcgagtgcttttcgaattgataaattatgtcttttttaaaaaaaatatacaaagttatttttaaaaattatattattttgttaattttataataattaatatttaattaattatgtgttaatagcccatctcgttttacgtatcttttatttttcctttttcttaaatatagcgtaccttccaatatttaagctatttggtttggggaaatatccagtgaaaaccattaaataagtgaaaattcatgaaaaatatatctaaaagttttttaaattcatgaaacaattattaaagatggatataggtatgaaaaacattcataccaaatcttaagacaaactcaactttatttgagaaaaacacaaaagacaggtgagtagggttctattactattcaccacctgaaatttgtctttttttattactctataataaagttgggttcaaacttgagatttggtaagaatgtattttatgtctacacctaactctactaatttatttataaatttacaatctttgtggtctagttttcacgagttttcatttattcgatggttttcactagatatgtcctcgttcggtttcggttaacttggatcggttttcggtcatgaccagaatatatgaaggtttcaagagataaaaaaaaacttacaaataacaacaaaatttaagaaagtcctttacaacatattttgacaatcttcagactggcacatttctctagagccagggccgggataaaacacataactaaatcgactaatgcttgggattcatgtggttcttacacccgaattctaagttgttgacccttttgcttttccaacaatttgtacatatgtaattgtcgttctattagatcataaaaaaaagatgaaatttctgttttttcttctagatgaatacgatagtgtgatcgtttctcttagtgcaactggtttttttaagatgctctggaatctaattaaatagtgtaaaagaaaatagtaaacaataaataatgcaccaattcgcataattctttttttttttgaaatgactcacacaaaatagtgtgaagtttcatattgatatagtagaagaaaaatacaaaattataaccttagaggttgtaaccagggaaaaacagaaaataaacacaccccaccacctctcgttaacatctccgcatgcaaccacggagaagatataacaccaagccaactacctctaaacgtgtccgattgttgctaaattaataagggatcacaacggtccactgaatatcaactccacacatagaagatcgtcggcaagctcctggtcacatagagggattgagaaggaagaggaagataaagaagaagattcactcgtccctcacgtcaatctgattccaacttcttacttgtaacttcgtgatctcttggatgaagcggcaaaaaaggccaatccttcatcagcatcgtaagctagtaaaggtgcgatggaacggtgcaagactgctcaaaacaaagcgccatatggatgctaaaactagctcaaactagtgggtagtggctgcataaaaagaggaggagaaaagggcagttgaagctcaaaatttacccagagtttgtccacaacgaggccataaaaagagcacaagccaaacacaatccactaattttatcactctagtagcagtagtaatttacaatccgggtagagtaagagcaggtacaataatatcaggctattaaccagctataaacatattttaatgagataaatgatgagagagaagagtagcgggctacagatctaagctgtagcacggactccaagacacactgtgtgtatatgacagatgaatatattaatagtatagtaaacaatctttgtatgaattgactatatataaattggagctggtagtaggcttgtactattagacttgctctaaataaactcacaagtagtagtaggagtagctttcaccaaagccgaaggattctcattctccccgccggccgatttataaccgcagcagcagtcaaccaccaccgtaccttttctccaccttctcacgccaatttgtcgccgtaaataaaaattttaccaccaccactttctcccacgcggcggcgaggcgaccgctttgctttctccggcgcggcggccggcggctgaagcgtgggcgggggttggggcctgtgggggccccgggaggagaggaaagcggagcggttgctttgccggaaaaaaagatggagtgtagtgcggtttgctctgttgctcatatccatctcgtcttccgcttccctccaaattgcaatgcggctttgggcccaaatatggaacgggcctatgtctgggcctaaattgttcgtgggctttctgggcttccctttttcccctaccagaaagataagataacggatttgctattttacttgcgacggatttttgggcttctattttttccccgtaggattctacatcaagatttgcgttttttatattcacttatggttgcactcagttacatagaactcaccctcagttgcatggcacttacacttagttacagtacatcaaaattagattttacattttttttatctagatttacgattttcaacatgtttgtttcttttttgggtaattaatttaaaatggttcatatcaattgatcaaaaattctgcaagattcaaagctataaatatgtcgaaacattaataggtagtccactgataatggaagcaactttatttggagtatctttatcttagaggaatctagtacaataggaagagagggaaataagagtaaagtgcaccgatggtctctaaactcgtgtggatgtattatttatgttcataaactcttaaaatgtaattttagatatttgaacttatcctcggtgtcatataagttctaattggctctaaatcacctcatgtgttgatgtggcatgtaatgacagcgtctatgtgtaaaaacatcgttttcttctctcctttttaattttatttttttttcaaaattagaaaacattttttctcctctctcctctctctctttttttttatttttcctatgtgactgacatgtgggtgtcactacgcatagtggtcactgtggtgccacatcagcgcatgatacgggttagatcccgtttagacccatatgacactcagggcaagtttgagatccaaaaaatatattttaagagtttagatatctagatgatatacccatataagtttaaaaactgctcgtgcacttcgcttaataacagttcggcttgtctcctcatcagcttagatcatcactttgcttggcaatatgacaatagaggcagcagcagagggatggaaataattggtgcaggtgatgatgcgatgcaaccaaaataaccggataaagggggttaggtgtcaggatgaccacatgaatgaccgatcgagatggcataacatgataagcccatgcacacgagttaacaaggtttactcgacaattcatatattgccccccgagagtgtatgtgtgcacatatagttcttattgttatcttggttgtaatatatgcttaaaactatatttacaccatatatataacatgttggtccagtcatcagtatgacatgcaacagatacggttaaactttcattacaatatatttgtaaatctcgatgaataattataatatttatgatttaataatctaaaaagagatatcaatgttcagagtttcagaagtttgcatccgcgaaaagagtttcaaaaatttaacctagactatatttcctccgtttcataatgtaagtctttttagcattgttcatgtttatatttatatagatgttaatgaatctagacatatgaatataagtaatgctagaaagtattacattatgaaacggagggagtattatagaagatatcctttggaacagagaaaacaaatatatagaggattattcttacgggaactgaactatttcacgaaacaaaatcctgtaaaattaattcatgtattatataagggagccctagatccatgttttcaaacccgatggagagggagtgaatacatgtattgagatgaccactccagtagccttttaatttccattttaatctctgatctgatcggtaaactctcattaccatataattaaggtcgctagcaaaaatgtcaaacaagagatctaacatgatgacaccaagatcccggcatgtcgcttggtttctgccacaactttatgtcatcaaattaattactacattagatctctggagtttgaatcagctaaaggtgcttagctgcaggtttcttgcaagatcagaagagtgacatgcatcagcccaagactacagacaaagagtagtacaaaactagagttttattttccactgattatctcatctatctcatcaggtacatgtgaccaactcttaatttagtttcttaaatacgtttacagttacattaattagtatatcccgatccatttggtttatatatctatggttacttcgtcttcgctagcccgtgtgtgcacatttaaaaaatgaaaatgcatacgtgcgtgttagacatgttttttttttactagtaatggcagtataacttctggtaaacacaccaattatgcacatagtcatttttgtatgtatacatgcatcaagttcaactgcaagaaattaaaaatgataagagaaattaaacagcgtcagtctctttctctgcacgcacgtaaccaagcatgcgcacgagtgctccttcgataacgataagctatataattttgacatggatcatcatcagcttagtttagttttttttctgcggctagcaattaattacattgtaacttataagtaagagcttaattagttccacattgtgtagagtgtgtgtagattgatcttattcgactagaagatcgatttatcatttaagtttccaaaagatcaccggaggattagtttcagatgaactcgaaatattcagaaaatgatatgatatctcatgcagtcagttcgatggatcatctcctttatagttttccttttgtgtttcatttttgtgagctgttcacttctaactcatagtcatgcttagtggcccaataaccggatcgaaaaagatcattggatcaattcttttttagatcaactcgaaagattcggaaaattatatgatgtttattacggtcagggtcagtttacatagtagagcatacgtgcatggaatgatggaaagagatgccaagtaattcttggaattaaggttgtaaaattactagtatttatatacatcgatcaacacagtggggattatttacattactgcacctacagtagctgccattgaaatatgggattgggaccacccgtcaactactgctactgcaagtgcagtactgcagaggatccgtgtcccgatcaaccgggacaccagaaatgtagaagcaagaaaaaaaaatgcaggagaagaaaaagctagggtcatttccagcagcaaaaatatgtgtccatatgtgtgtttttttacaccagcaatttcacagctttagcgtcaggtcgagttgacgcgtttgatcgtctccgtcgcgcggccagtagtagccgacgtttccaccgccccaccaccaccgctcgccgccgccgccgtcgccggccaccgagatcgccggcggcgcctcgccgtgaagcacgcgcgccatccaccccggcgacgccgacacgaacgcgccgtggtggatggcgaaagacgacgacgacgcttgctcgccgccggcgcccgcgccggcgccgcgcctggcgagcgtgcgctcccgcttgtgcgcgttctggtggccgcccagcgcctgcgagctgtagaactcgcgccggcagtagtggcacgcgaacagctgccgcggctcgccgtcgtcgtcgccgtcgcgttcctcctccttcgccggcgccggcgacacgacgagcagacgaggcgccgtcgcctgccccggcacggcggcgcccaccgtgccgatgaggtccagctcgacgagccggagcgccgcggcggccgcggccgccatgcgacggccgccgccgacgaacgtcacgtcgcctcctcctccggcgagcttgctcatcccttccatggcgcgcgctacgtcgacgaacaccaccacaccaacttaacttgagatgttgcgacgcagtgcaatgcaaggtcgtagtatatatgcaggcaaagtaccaaagtctatgcaagaagatcaagcaaatgatcgagacggagggcatggtcagctggtcacgttcacgtaacgtgacagtgacgtactccgtgtcaatgttgccattatgtcataaataagactatccgtttcacaatatatgtactatatttattatgtcctatccggtgaagaatttaagatgcggttactgcaaattactccttttaatctgccccgaactagatgtttcttttttccgaaaacgcagtacagacacggacgtttataatgcgcgcacattcacccccagtaaacgggcacacgtacaccatatccatatgagcacgtttgaaatattgacctgattgacgaagtcaccacgggcatacaaatatcatatccctatgagcacatccgaaagactgacccgacatatcttgagattgacgaagtcaccaaggactaacccgatatattttgattttgacgaaatcaccatgggacatatcttgagattgacaaagtcaccacggactaacccgatatattttgattttgacgaaatcaccacgggtgtctcgctgtcaataggtatgccgcatatcattgaaggaataattaatcgcaaatgcgagtacctatgtcaaatatagaatttgaacctggataggttggttccaacacaaggaacctaaccaattaagctttatatgcttgcaaagacacctacagatagacatgctaacatacaaatttgaattaaattggttcatgtatttagtagagatatctaagataatctcttatatatttttataggatttctatatggctgttgacagaaaattaaggctaatcttagctaggttcgtgctctaaccacctagatctttctcctctagctccaacgactggtgacgtcctaacgagttagagtttagggtctcagattttggggtgggggaagggagaagaggaaggagatcgcggggtttagagagatggctgtgggagacgacggcccaacggtccgcggtggacacaggcggacggcgaggtagcaatggctccaaagctgccaagatggaggaggggcagagggccgatgttggcgatgagggaaaatagagcttgtagttaggagatgacggttggtggtggcgtttctagcaacggggagctgtcgaagataggaaagaaggcgccgcaggggcactcgttgccgccaacttagagatgagaggggggggggaacgctgcgatgataatgacgaaaagagagaggagggttagtggtaaatggcacaaatcttaaaacaatccaatggtttagattttgcaagatttgtaatggcattttttcagtcaaacgccatacagacagtccctatcgtttagtagtttgtaagagagcaccggaggtgcagtgtgcatgatttcaaccattacgattcaagccctacaacaacgaatatgcatgtgtgcttctaaggcctttcacagtggggcggaacttaccgtggcttcgtctcacgtggcaagaaaagtgggtggggcccatagctatactcggttctccggttcctagcaaagcaacgaggaacttcgctcgggcgcggggcccactcggggcgcgggcccacttggtgagcacgcgggcgacgacgactccgcgcccctatgggaggtcctcggccgctgcccatggcgagtcgccggcgcggctctctacttcaatcgccggccgcgtcggccacgccgcccccgatctggtcgaccggagctcgccggccaggagcggcccgcttggggtggagagggagatgcgggcggccccccaagctcagctcagcgcgacgacgacgacaccactgccgtcctcctctctccgccttctcgtcgtcgtcggttggagctgcttcgcgtcgacgtcggtggtggccgagccgccgccgccgccgccggagaggcgagctccggaagaagaggaagaggagagagcaaaatgttcggcttcgggcaccacggccaagaccagccaccccagcacgtcggcggcggcggcgcgcaccagcccacctttaatatcttctgccgccgaccaacccgcgcgacgagcaccagatcccgaccaacccgtgcgacgagcaccatatccgcgcacgggatgaaggcggcgcccttggccacgccggtcacgagcggccctaccgctcctccgcttgccgcttgccgaagatcagcccgaggacgccgccgccactgtcctcccgcaccgccgctgccgtcgtcctcccgcgccgccgccaccgtccttctcgctccgcctcctcgtcaccgcctccgggaagagggagagtcgggcgtggcagggacggcgcgcgccgccgcgggcggcggcagtgacggcgaccaccaccacagccgtagtgctcgctgacgacgggggcagaggcgacgggggcttgagcggaggcggcgagggaacgggcggcggaggaggggagagccggcgccgttgggtgacgagggaggaggaccagttggggatttggtgtcggtgaagatatttgtgggccccacaagtggtgcttgcactgtgaagagagtgtcttcatcctatgtgtcatcctgtggtaactcatatggggtgcttgcactgtgaatggcctaataaaatttcagtgaagttaatggatctataaacggttcaaatcctatgaccacgcataatcgagtgtgctttcaataaaaatttagcgaggattagacctatagttttgcaaaattttagtgaagatcaacagatctaaggtccatatcctacaaccacacacaagcggatgcgctttcagtaaaaaaaaaatgaggttcacatatctttattttcattatattttgcaatttatattttattttgttggattagtttgtacgcgtggtaaactacggacaaatattaggaaacaaagagaacagcacaacaatcatcaggcaaagcaaaagcaaacagagtttgcttccggcgaggggaaacggctcacggatggtcggctgggctgatgcaaccgagagagccgctcgtgcgggcgacttgttgcagagatgaggcaagtgatgccgacttgggcaataggatatcattgatccctatccccaactgaacaagtgtctcaaaacattccaacggccaggttaagaaattcagtaggaaaccatcatttcagagcaggtatgactgatactattgtcaaacaaaagcgaattaaaccatcattcagaaaagaaaaaggcagtggcggcagcagcagaatttgaagcctgtccacactggaatggatttgtcacctgagccaagcaggccaaagcttcttgcggtttcttgcacggttgtgctgcaagagcatgtttaataattccatgctatgtgaaggaaagcagaagaaccctgaggggtatgaagataaggaatcaacggtgataccattcatgctgtgatgtttcttgagaagtaaatagaccacacatgttttcctagttctgtaggcagttgtacaggataatcgatcgatcgaacgaacgaaccatcccctacgcgatctaggtctacgggcgagcactcagtccatccttcccttgatcactctctcctgaacctctgtgggagtcctgcattaaccaacaagccaggaaaacaaatttcacagattcagtaaggacaacgacagcattagagttttcatctaaactcccatgtttagtgtgagtgaaaaatgatcatatatggaacttacacaaggagaacataaccaccccagccactcaggcaatctcgatcaacagaagcctgcagcgcttgtgagatcgtctcgaatagttcttccggttccttcaccaaagaaaattgtgacagaaaaatgtcatgtttacagtgctcaaggagaccaaactataagtaaaataccattctgcagatagttttcatgtaaactaaccatgcttggcttatacatggactcacaagcaccatatagtgattctgaagcagtgccagaaaccacaaaatctttcgctagttccctgcttacaagaatcacctttgattagtatgaaccttaaaaatataaaacaaggcagtaaatcagcatatggtacaaagtgaaaagataggtatcatcaaatgctactgtgtttttaagaggctagagacttacagtgaagacgaaggtaggataaagtttgagaatggaatacagctatatctaaattaacagtgtgttactaagaggcttgagatttgtcgtgaagaggaaaataggaagttgggaagaatacagctatactaagttaacggtgtgactttttgtagggctgctattaaaccctacaatcaagacaaaccctcttaaatcacctaaatggctacgtatatgagcaaatgaatggaaatgacaagcataatcaaacttaacctgagattcaacttgaaaaattaagactaaactagaagtattaaatatgagattatttactcctacacacactcccaaggggtatgggttgtatgatatttatcattataccaataatacattgtttatggtaccgttgagaacttcagatcagttgaattttggacaataaatttagtaaacgactaaaatgagacgagagaatataagtgatacatacttggcaccaatgcaatccatggtacatataaatggctcatcattatctcctaatccagcaataactggttggcagaagtacggcccaaacctataccatggaaatattctataagctgtttgcatagttaagtcaatggagagagaaaatacaaaataagacgagatctgtgagtttacaataacagaaataccataggtttacaaaacttccttgtacatttgattatttgaatgatgaatgattcaaagataggatttgtgaatcacatatgatgtaaaggatgtgttaagccaaaaccaagaattttacacgatggttgttaaggatgtgcaataaccaaaaacaagaattttacacaatggcttcagcacagtgagaatcaaagctaaatagctaatatcttgccctacagatcagaggaaatcatatcaatcactagccccactcgaatagcagcaatgattctcaattttcatcaagttgatataagaattaacataatacaactaatacaaggcatgtaagaacgactttgcacaggaatttcacaattcagtaaagcaaatattacttcctactcatcttacacatgaaccagttacttagaacgcgatcatcatcatatcatcatatcttcaaacagggctagtgagcattctaacctcttctcgtagaggagcgcggagacgaggctagcgaatgcctggggcttcatgtccctctcctccctcagctggtacagtttgtgcctgaacaccagccgctggtacctgcaaacacacggcgcacatcaaaacccccccaaaaccctaactaacaagcaactcaatacgccggttctagagcaaaatccgagagttccgggacacccacagcgtctgggcgtcggtggcgaggccggagaggccgatgtagagcttgtcgtggatcttgaacaccctctggaagtcggtggcgaccgtctgcagctgcaccccgaggcgccggtcgctggcgatcgcgaagcagttcttccccaccatcgccaccacggcgctcccgttgtactcgaagatctgcagcgacacgaaccccaaatcccccgccatcgccgcggatcagacgctagggttttgtgggagcggagaagggggagggggatcgcggggggcactcaccgacatgaccggcgccgatgggctcgacggctgcggcggacggcgaggaggcggcggcggcggcgcgcggcgattccggttggtctccggcgagcgagagaaaaaaaataattaaagaaaaaaaaacaagcggcgagtgtgatgtatagagaagtgaactgtaccagatacggatacgtacatgggcccaaaatccagcccattactgataggcctgacgccgctaagaggcccagttttgtgaggcccgtataaacataagattatctcgtgggccctgcccataataagggtttacattttttgcaggccatttttaaagaaaaataaaaagataagagagattacgcaattatgctcaaatcccctgaaatttggtttgccattggatggagtggtattggagaaacatccatatggactttgtgggaaatatcatactcactccgttttttaatagataaccccattgacttttagaacacgtttaaccatttattttattcagaaattttatatatatgcataagatataaattgttgtaaaacaactcacaacagaataaataaaacgaatggtagtatgatgctggaattcatatgtattattcttctctgtatttgagcttttctgtgctaactcaactggacatgccatgttaattgctttgcttttactctactgcaatttaaaattatttgcatttcaaatggtccaacatatttgctactagtactagtacgcaactgaagcttgcaatcctcagatgcaaggacgatttgaggcgcattatacttagtactagattactagtacgacgtgagattaacttgagataatccagcatatgcacgtgaagaaattaaatgaatcagatgcattgagtacctcttccagtcaagaagcttgtacgattgtaccaactattttatactcctaaaatataggagtaataagttttagttctaattctagaaaaaaaaacttattttattttgagacataggtagtactagattattttatctttggaattgaccaatccattttatctcaaaatatagtttttttttgtttttcaacgaaattaaagaaaagataaaaagtaaatagtcggttggaagtcactgaggttgtggagatatggagtattttgaatattttatgactatatatagaccacccttgatactatagaaataggtatattttgcaataaaatgtgaatagtataagtagctatgttttagatggagggagtataatccaaagctactctaaaattttaaagtgtatttcaagacttaacaattcttggatggtaaactgataatgttctcaagcttgataagcaagaacatgaacagagagattggagaaatgaatgtactactaaaaaacacatctacattagactttatcacactaattttgaagctctcttcgcttgccgatgaatgtaggagaatatcctcctctagaattgttttatatatttttgtgatgacccaagctccacaattccatgaaaaggccaaaaaagtgtatccttttgaaatttggcagaaaattcctctaacaatcttcatttgcctttcttagaaatataatctaaataaaagacttgaacataaattaagcataacacactatacatgcatggaggttaagtgggaaaggggggatgactaagctaacagtcaattaaatttaagcataatctcttggactttttgcatgaacaactcacttgcctttcaggtagaatgagacattccagacaaagacaagaaaccgtggtgctctgccccccagcaccattgatgccaataattatacattcggtccaagaagacataaccagcagtgtcacattaatccctacttgctaaagcaggtatggatgtgtggtctccaactaacctcatcaaatactatctaattatgcgcagacatgtccccatgggtcattacactgaagttgctacaatattacatggctctttttcttgcatccaatgacaatgcaaccatatgatattatgatattgtcttgattaatttcctacctaatatgcacatgctcattagttcactttgtttttcctagccatgtatagatccttggattttgaaaagggttagttagacttggatttgaaaagggttagttaatctaccagtgattgtgattccatttgatatttgagaactgagacatatactcctgtaccagctattacctcaatgcaatatgtttcactgacgagtgggcctgctagattatactactgtaccagctaacctttagtttggtcatgttgaaaagtacattgccattgtgaataagacagcagaatagtagatgtctctattcacaaagtacagtaagtggaggtcacactactcactacacctaccaaatcattattctttgtacaatctactacttaaaacattctgtacaagactcatagcccatcactagcttgaactagaagtggacaaggttaagaaggtgaggaaatttacttgaaccagagagctcaaggtcaccagagtctacaaaggaaaaagatggatgaagtaattttagaaccatacaaactgacatctgatttcattcttcaattgccacttttgtttctaggattcttcaaatgctaactcgaatgttgttcttcatcacgcataaaacttgattttaaagggaaaataagtatgcgaatcagtagacaccatatatgtgagtgtaagacacaatgtggcacattgagcatggccaaagatttcttcaatgctattgagttacagtatgaaaatctttaatatttacagcagtaatcagatccaatggggggggggaaggggggaacactctttacttgcttctttatacagcctacgcaaaccccgaaaatctatgaaatgaatcaacaagttgaaggtcactaggagagcacactcaacctcaggcaagcaccaatgaaggcaattcaagcaagaaacaataacctgcactcaacaccataagttatccgaaccacttgggtgatatgaactcactgaatcaccgcattccgatcacgcatttccttttctttctcaacagggagactgctttcgagttgcgcaaggtgattccggggaaatcctcagtgtccctccaagctccatggggactaggggaatcagagagtggagtacatctgtgattagtggcctgtaacttggttctggctgcacacagagcacagccaccgcagcaacctgcgaagtagcgaatcacacaaattgaattagttgaaaagatttgtgaggataaagatagaaattaagagggagtttacttggtacaagtgcttcagatccattgtgttcttgatcatggggtcaattatgttagggagctttgatcggtcagttagctgaggcatggcctgcatttgatttccatatgtcagatgccaatggattaggaaaatttaacttaaccacctggattcaggagatgaagcttaaaaatattctatgcatatcgagagaatgactgttttttaattgaactaaattcaacatgtcaagtatcagaatgttgggtacccatgtaacaattgactggcactgagattgtgctgtcttctcaacaggccgccttcccaacagaagttcaagaagtactactccaaacgcatatacatcactcttctcagtcaacttccctgaatttcatgcggttgcagataattaaattagatgttaatgtgagaaaaaagttagtctacatagacgattacaggtgggacatgagagttagtctacatagacgattacaggtgggacatgagaaaagagagggcataccatctaacaagtactcgggagctacatagcccaatgtcccagaaagcttcaaacttcctttgctgtgattcccactggtcactgcaaggccgaaatctgaaatctgcaaaccaaagatgatcagtgatatgtgttacgattgacagtaatattctaattgacaagaactaagataagcaggcataccttagcattgaaatctgaatctaaaagtatgttagatgacttcagatccctatggataactggtggattgcagtgttcatgaagatattctaatcccctggttaatttagttgacagacgcatatgataggaatcaatgataacggtataaaaatatatttaatcatgcaaagtgaataaaaatggatggtaaccttgctgtgtcaagagcaatcttcatccgaatgtgccagcttagagccgacccatgtgatggtcctagaaacaaacaaatagattaaaaatggatacttctccttgatcatactcacaattctgaggaaacaaatgaagaacaaagcaaattagaaggtaccatgaagttgtgcttccagtgatccattctccatcagctcataaacaatgaaacggttctcttcatgaatacagaagcccaaaagggacactatattcagatgccgaatactgccaagtaaatctagctcattctgccaattcagaggtaaccaaaaacaatcttagcaacaagacaagtctcatcaagaacaaatttcaggccatggacataaacaatcaccaacctcaaattccttctcacagtcctgtcccctgtggccaaatctcttgacggcagcaacaagtcctccttcaaaattggccttgtacacacacccaaacccaccagctccaagcaaattgctctcactgaacttcccggtcgccgtctcaagtgtattatactccatcatcgcgacaagtcctttcttgttagtcttcattgagttgaacttgttcagcatcggcaccaacgcaacccttgcggtatctgaacaatgcaaagtagtaagttcagtagctatgagattttcatggacaaacaagacaagccaacaaggatacatgaaccagtctgggcagggcaaagaaaagggcccaattcaaaacctgagctgcttcggatgttcttggagtcatgggctcggtgagaatgccggcacaggatgcaggcatacaatacggtggcgacgatcgccatgccggcgacggatgcaaggccaatggcaatgataagctccttgtggaaatgatggtgttgcctctgctccattgctgccactgcacctgtgaagcatagaagcaaaccaaagggtggtggattagagcactctaagtgtttgagtgaaccaattcgagaagatgaacagctactaggccagctgctcatttgcaaaagaaatgcctttgaattttttaggtaaaactttttatgtacaaaatttggagaacccccaagattgaaaaaaaaaaagaaagaaaaagcaacttctctttcctacaaccaaattttgaggcaaatatattggagcatcttttgtttctcttttttcctttcgaaagaatgcacttttttgtttctttcccaagattgggcaaagttcaccatactaaaaagaacgagcacatatattcaattccaattcgtacccaagttcacgagacggcacttaaagttatgcgctttgttcaaacttggaagaaaccaaaggatcccaagggcgcactttttaccccatatctccaaaagaaacaacacgggtttcccaccaaatcagcacgggaatttctcagaaatgggtgaaggaaacatcgataaaatttctccctaaatttttttaaaaaaattagccagagaacacaaaattcagcaatgcgacaggacaccaaaacacatagacaaaaaagaaaaaagaaaacgcaatctttgatccaactgtaacagccgccaacctacccaagggaggagaaggcgccaccgcggcggcggcggcggcgggagtcacggcgaggctgccattcgaggagaagatgcctccacctccacctccacctccggtagccggagccggagcagggggaacaacccgcggtgtcgccggcgccggtgaaggccccggtccaggagaaggcgaggccgccgccgccggcgaccggtgagtcctcccattggccggcaacgagcagctcagcaccagcaccagcaccagcaagaagaagaagcgggaggaggaggaggagagaggcgtcaatggcggcggtggcatcgcattgaccctctctctcactcactcacctcgctggctgaagaggaggagaagtggagaagacaaagggaacagcaagaacacaaaggcctctgtgcctctctgacaagataccatgaaaacccagggaatccaaagataaaaaaactaatgcagatattgtgaccagcaggttgtcctcttcctctcctcccctcttgatcctcgtgtgcactcaacccaaaccaacgatttgtctgcacaagcagcctgtttctttcttgatcttgggaaatggaggaggaggagagggaggaagaaaaaggcaaaaggcttttggtgcacggactgtatggattggtgtagtttttgtactactactcctactactgctagtactaccagggttgatctctgaagaaaataagaagaaaaaaaagggagaaaaacagtcatgtggcagttgccaaaaggcagtgcattgtttcttgttgggatggtgagcactgaaatcagctcatttgagagagattgagagagagagagagagagagagagagttggtgttgaatgggggtgatagtacatgtgcagtgcagggcagggcagagccacaccaacttcagttttcgtgccctctccgtgattccctccttccattccggcccacctcctcatcttcagtgcacaatgctctctggccaactggcgaatttcatgcgtacaaagtttaaattttttgacatattttggtcgtgtgtattttgagttcaagcctccattaaattcgcatgattttcacagtatttagttcgatttagaattgttccgcgcgactttgttgtaaggtcttccttaaaatgtagacgatatcttatcaggtctgatcataagctaaaactcttaaacaatttgtgggtaaacttttatataacccaatgctagaaaataaatgacgatgaaaaaaatcaaattcaactactcctataaaattaagttttcaaatttaaattttgataattacggttgataagctgaagagtaaatgatggaggagctgttagtttaggttctgtaagactcatatggatttgaacactagtttgatatactaaggctaagttcgttggagtgagttgggaactaatccctccggtactacttattagcgtataattaattaagtattgatatttttttaaaaaaatatattaatataatttttttaaaaaaaaattcctgtagaattttttttaaaaaaacgtaatatttaatattttaagaaacgtgcacgcggtaaagaaaataaggtgagtcggaaaagaagggggaataacacagcctaaacgttatagatgctgttttgaaataacggttgaacatataaataagtggagtaattaactagagtagttaagacttttttgcagctgctaccaactcctgacgacacaaaaaccgcggcgtttcaacgggagagcaaacggcagttgagattgttcctctcgatggagtttaaaaccgagcttaagtatcatcatcaactgagcattgaatcgatctcacccatgaaagaaatgttccatctatctccactgtcacctagtgaatgatcgcccaaattaaattcggcagcgattcatttcgatttcgaacgcacggacaggctttgttaagaggatgagactccacaggtagtactactagtacaactctctgtcggtgtttctctttcgctaatcatgtttagattttacagtgtcagggtttaatcagcattttattttatttttatttctttcagatggatgcagaacaaagcaattctgttaattaaaatgttcagaaaactctagttgtggcttgtgcaatgggaagtgtagctgggtttttttttcttctgtaaaatcagactaaaatttaaattggcaatatgaaacatactcctatacgatttgtaaattggattatcagatggtcgtaagggtgtatgacccacacgtacacgctgaacactgccgtattcggacaagttttcgcttcaaactgcagaaaaaaacatgcaacttttcatctcaaacgcctataatcataatcaacagcagagtacacatgaagtacaccttgatagtaatttttatatatacatgtactatgatgcttcctcgaccaatccatctagattgagataacaatccaggtgattagcacagtaaaaataatactacctgaatgattaggtgacaccttttggtactataaaacaagaacatgttgagatgatgttgtgatctttgtgtaggccagatcatgcatatgcatctgcagatggtctccagactctagtgagtgattgccaggtcttctggcagtgacaatcagcaatgtcaaaacattgcaaagccagaatggaatgcatatgtacaggggaccaggcaattttgttgcatttgtgatctgtcagaagcagtcacacggcaactggctaagctagtggctaagctgctgatcgatctgagccgttgatccatacgctccaaccgtctgacggttgggaggataagtatatggtccaattagttaatgaagggcctagttgttgatttaattgaacgacctactactgtggatagctactctagtcaagtactatattagtgttggtacataatactaacaatacgtgcaacatcaaattaattctattaaatccaatatttgcttttatgttgaaaatattgaaggtcccttcgttctaatttatttgtcgttcaaaacttttagagatgttgttctagtttaccataccctcttcgtcctaaaatataagcattttaaacatagtgtcacgtcaaatattttttactttgactattaatataaaaaaaattaaaaatatcaattatgtaaaattgattttactatatttatcattaaacaaactctttttatttaaaacattctatttttatagatagtgttgatcaaagtaatatctcgaatactatgttaaaaaaatgcttatattttggaacggagggagtaacatttagttttttttttgttaaaatacttgccgttctgatattccatatctttttagatatgtatttcctttcatacccttcactaatatagcagtagtagtagtactaacagaaaaaaaaatgaattgctacctctgggaagataattagagatgctgagggtagcaatataataggtcacaccttttaatttagtactatgagatttgccagaacaactaacaaactgaaaccgagggaatacatttctttttcctataaatttacataaacatgaacaagtctgacactcaacaaaatggtggatatatatgtactactaattacgttgtggatgacgcgagtgaagcgtcacgttattagttaggctgttgcttgctgggattaattgcagtggcttaagcagaccggccggcacgggtgattgttgcaaatgcttacacgcagtgtattgtagaacttactccgtttcataatataagtcattctatcatttatatatatatattattgttaataaatctagatagatagatatgtctagattcattatcattaatattaatatgaatgtgggaaatgctagaatgacttacattgtgaaacggagggagtaagtcattctagcatttcattaatggtaataaatctaaacatatatatctatctagattcattaacatcaatatgtatatagaaaatgatataatgacttacatttatgaaacggaggagatactatcagtcattgatcaagaatcacgggtaccagtacaagctttgaaactacattatctcggtgatgactttatcttgtcaggtcactaccaaatgatgttgcagtcacgcagcagtagtacattatagattaccgtgtctgtactgtgtttctacaaagaaagtacattacagattgtgtcaccgtgtaattactgcgtcaaatcgggtgattagtcacccatgtgtactcttacgtagtactggtacgtacgttacagaatgttttcgaggtatgtttattactagtttattagctgcagctaaattttagaatttggaacttttaaagttaattttggagggttttcttcgtcgtggtctgttttctagtcaagagttttaaaccgctaataaaacaaaatataaatgttttattcttaaattagcgtggaagaaaatactctctgtttataaatactccctccgtcccaaaaagacttaatctagtacttcgatgggacatacaacgaatctgaacagagggagtaattgacaataagcactattcatttttgaacttggaccattcatctttgtgttttccttgattgtttacacagtactagaaatgatgccatgttattaaagtggattagttgtattaactaatggtcaaacaatttgagaataactaatggtcaagatttaaatagaaaagttaaaattgtcggttatttagaaacggatggagaagatggatgtatggggaaaaaagaaggattttagagtggaaaatttgtttggtggaattacacactgacgatcgttttcgtcgcgataccggtactggaccgaattacggatctgcaaggccggtgtactgggccggaccgaaatctttgtccggctccggcccatgggctggacagcccatcaccaccagggcacgtacatatttctccagggtttatagggggtatcttaagcatagagcttaactatgaagcataaattttgtatttaaaatttaacttacaattaataatatatgctaacgcaaatttttctaccaggtgtaaagctcgagccaaagctgccccacactgacctggcttcatccccgaggtccgagtagaggtatcgtataggtccgagtagaggtatcgtatcggtatcgtatcttggtaggaagcttggtaatcacgataaccgcataaaaaccatgataaacactgaaaaaaatcgaacaaaacttatcacaactttaatcttttttaaaagaattgatagggtcactggctgtgtacgtgtggctggcggcgataacaaccgcggtttcaattcgcgctgctcgtcgactcagggtgtgtttagatcctgaaaaaaattagatgtttgaagaaagttgagagtttagaaaaaaaactagaagtttatgtgtgtaaaaaagtttttgatgtgatatgatataatggaaagttgggaatatggggaaaactaaacacggcctcagcttggtgcaacatttgcttggtctcagtcgatctcgtcttaaaacttgagatcacaggttacagagactctctgatctcctctgcacgcgaacgatccatgcatggccacaaaatcacaaacttcaatagcaccacaaattcgtatgcaaaatcctaccaagacccttacgatgaaattatgtatggatacagcttcaaaacgcaccagtacgaattatttcatatgattttttgattaatttcaatgaaccgaaaagtagttgtaaacttgtactggttgcattgcatggaatggaatggaagcagttggttaatgcctcccttaatgacgtgtttgaagaaaggggaatggcttaatgatgcggttaggagacgctgtagcagcaaacagtgtacagtgtacttagtacagaccggtacacgtacgggggtctcgcgagaaatggtacggtacggtgagccgctcagcggtctaatcgtggtcaggggccggatgagtgagggctcgacacggtctacgcctacgcagctacgagtacacttattacagtacttattatttgtctcaaagttaactaaccccattctaatacagtaaatctggacacgagtacacttactacactacttattgtgtctcaaaattaaccaaccctatcctaatacaatgaatctagacactttataatgtatcacaggaaccctccgtcccaaaataagtgcagctatggttttccgcgcccaactttgaccattcgtcttatttgaaatttttttgaaaaaaaataaaaacataagtcacgagtaaagtactattcatattttatcatctcataacaacaaaaatgctaattataaaaaaatttcaaataaaacggacgatcaaagttgagcacggaaactattttgggacggaggtagtaatattcatgtgtgtcagcctgatcttttgtcagtcgcatacttctgcgattttggttcagaacacctactgccgctactcctatgtgcatgtgaaagccgctctgcattatacggttgtactggtatagggtaagttaccacacaaaaaattttacaccatgtcacatcgaacatttgaacacttatataaattattaaatataggctaaataataattaattgtacagattgcgactaatttacgagacgaatcttttaagactaattgctccatgatttgacaatgtggtgctacagtaaatatttactaatgatggattaattaggcttaataaattcgtctcgccgtttactgatagattatgtaattagtttttttattagtgcccgaacatcctatataatactcgatgtgacacgttaaaactttatacccctggatctaaacacccccaaaatgtttagaactcaacctaataccttgtttggggacttaaatttttgcaaaacagcttgtttgtactatgtagcttctgagaagattcttagagtctactcactctataaataaattaaatcctatggatgaatttgatccaggttcatctttaatattataatttctttaagaaataggtaaggacatatattcatccatctcaaaatattacaatttaaaaaaggatgtgtaatcagttattcagttgtaacgtcttgggacgaaggtagtaatacgaagattctaaaaaaaaatagctacagccaatgggaaacacagagcctaaaagctcaaatgatctgatcagcagtcaacccccggcgagaccactacagtactacacattctccagacgccagctagcgcttgacattgtgtgtgtttagttcacgctaaaattgaaagtttgattgaaattgaaacgatatggtagaaaagttagaagtttatgtgtgtagagaagttttgatgtgatgaaaaagtttaaagtttaaagaaaaactttggaactaaactttggccattaccagtttaccatgacaagttcaactctaggacgaattggctattgccacccccttctgatcttctagtagcaatctgggctcaaaatgagaaagaagagatacgcgtgtgcctggactttgtttgaccaagcgacccacatggagttttcaactttcctcgagatatctgcatgcatcggcgctgtttgacccggtatatatatctattcaattctagcagcatgggttagggagaaatgaaatggatgattcactcgattaattaacacggtaaattaatattttgaaaacaaactttaaaaatataaacagtaggagtagcaactaggaacagagtggtctaaatgcggcagaataatgttcgaagaaacttttttttacaagagtggagtaaacaatctggaccaataatctgccaacaagcaattatgaacaaggctgacctatgacaattgacaaacaaatccgatgttgggctgacctatgagcacgttaaggggaaaaaaatcatatgttacatgttataagacgttttgacgttgatcaaagtcaaactactctaagtttaactaactctatagaaaaaagtagtaatatagtagtttgattttgactaaatttaaaacgtcttataacgtaaaacggagagagtacattctatgccctataaagattataatccgttcttttctttaaaaaaaatacaatcctaaaacaatcaccttaccaatcaatcatcttacccttttatataaactttttcacaccttagggtgtgtttacgccccatttagttccccagaaatttttcccaaaaacatcacatcgaatctttggatatatgcatgaagcattagatgtagataaatgaaaaaactaattacacagttagggagaaaatcgcgagagtaaagttgggaaagtgtggatgcacagcctaaatgtccacagctagcctgagataccagattttgaaagaagttagtattttttcaactctaaaatcatgtttcagctgaaattgttacgggctgtttagttcgcgaaatgaaaatatttgggtgtcacatcggatgtttgaccagatgtcggaaggggttttcggacacgaatgaaaaaactaatttcataactcgcatagaaaccgcgagacgaatcttttgagcttaattaattcgtcattagcacttataggttactatagcacttatggctaatcatggactaattaggctcaaaagattcgtctggtgatttcccccttaactgtgtaattagtttttcttttaatatatatttaatgctacatgcatacgtccaaagatttaatgtgatgtttttggaaaaaaaaaattggggaagtaaacggggccttagttcaagatcatttcaaacttgttacagcagtactaggactagcaaaattctaatgactttcctttgctctaaacagtattccaagcagtacacattccgctgcacagccgtcttgcccgtccagactttgggagatatttaaccatttgccacatataaatgtggcaattaaccttttgtcactagacccacatgttatagacacatgtggacatatgtcattgaaataggggtgacaaatagttatttgccaaatctaaaagtggcaaatagttaaaagccccagactttggaggtcctcctgtccaccgtcactgccaggtgggaccagggccccacacgggcgaacacaaacggcggtcctcctgcccgcgccgagccacgaatcccgaccactgttgcattcgcccgcttaagttagtagcagctctcccagtgaccgacaagtgggccccacctccaccccactccagtactctactctagtactccctccccttccagttcaaccctccagtctccacccgccgctcctcccacctcctttaccttgcggcgtacgcctcgccgctttaccctgcacccactgacaacccggccccacctcccttccgctttgccactgggaggtggggcctgtggaaacgtgggggctaggggtgtcagtgggcggtgactcaggtgggccccgctagtgggggagggtagctatcgtaggtgtgcggggtgtgtgtcgtgtgggtgcgggattgggctatttttttattattccgcttccacccccaaccatttaaaagggacgagacaccacaccacgccgcggctttggtttcttcttctcccattccattctcttctcccccacccacctccacctccaccttcctctacggtcgccggggtcgggggattcgtcggcgagcgcgcgatggattgtgcgggggacgacgacgcggtggcggcgggcatcatctgctcgctgcggggggcggacctggcggggtggacgccgccgtggtggtgcagcagcagcagcaagggggcggcgcgggaggagctgatctggccgccggtgacgcgggggaagcggtcgcgccgccggtctccgtcggcggtggcggcggcggcggggaagaaggggaggtgggcccgggctagcccggcctcgccgctggactacagcggcggctccggctccgggtctggctctggctccgggtcggccgcgtccaccagcggcggcgaggacggcgccttctgctcgcctcccggacaccgccccgcgccggcgacgaccaaggttagtgcgttcacactgcacccgcatctccttccacctccgtcttgccgcctccgccgccgccgccgccgctgcattgggttcttctcctccccccaccactactctctctcctatccccatgttgctttccgagtttttttttttgcccttttccgcttctgttctgtaccgtgtgacggaattacccctactagtggcgaaaatcccttcccttcccttggtgaattggacaccgcctttccctttcccttccctttccaccttccttcttctcctcctcctcctcgccaattctccatctcaccatccactaccataatacagttcccccttctttgcttgcaacggacgcaacccacccatccatccccgtttccgcctcgcagatccgcattgcttccccacgaacaaatgagattctggattccacattggaattgctcgagacgacgagaccaaacagccgcaggaagaaatcgagcacggattgttttcgtccagtggttgtatggctggaagtagtagagtttgtggttgactcagggactcggcgaagtgggtgtgcggcgcacgcggatttcccatgctgcccctcgctctcttcaccatggccaatggggattggttacgcacttacgcttgttccgggggtagggtggtaatttccgtgctccttttatcctccggtgcaattgctcgtgtggtgggagcgtggtggtggtggtgggggccacactcccccccgcggttggacagagtcaaagctaggtgggcccgcgacacgtgggcgcccacctcccgcgcgcgtgtcggcggcggcgcgcggcggaggcggtggtcgacgtgggtgacgtgagcgccggcgagaggggccccacctgtcgatgacctgtgtcgggttttttcttttcttatctttccttttttttcccctttgaggaaaggtgagccgggcccacatgtaatagtcagtggtcgtagcggttggctgagcttcgttcgtcatgcggttgcgcggcgaatgggatggatggtcgtatgcagttctcgaaataaatcaatttaaagatttgttcaagttcataattagaatttgatttttctttttaaagagatggaggagggtatggtttaggtgtaggtttagctgagggttcctttcctattagcgtgcttattataactgatgttttgtttttttactaataatgtgggatcctgtgactatcatgcgttgggacagctgtggttgggggtggggcccacctaccagtgtctgtcctgtccttcctttgttcttgccaccatcgagtgtggctttcttggatgttgtatatgattttcagggaaaatgattgattggttggatttgtgtaaatgactcacagatggtttggttcgtctccctgtaggttagcgccatgggtcggcagcaacaactgccattctcagcgccgtcgcctctacggccggccggtcagcgtccacggaagaaaatggtgagccaccacacctttgtcctcgcaaccctgtaggtcattcttggttgtttgaatagtagtactacggccagcgtgagtggtgcgtacgcgcgcagggcactcaaaaaacagttgcaaagcaatgtatgtgtgtgtgtcacgtgttgggaaaagtattaggatttgtgtacgcgctttactagttctagggcaaaagaggagtctttgagtcttgacccggtcggaggagtaagccactatcatcacaagagaaaagggcggggttgttcttcttgtggtggttgagccatatttgtactagtttagcataaagcagaagctgctacatctcggcctgccctttgaaaggctgggaggttgaacaaaaagtggaatcttagggcaaagccacaaaggtgtactagccaacaaaaagatcaaatcttgtgaactgttggggggccaaagcctgttctcttgctggtgttgcttaattcgtcttaatgcttggttgttttggtgatatgcagaggctaccggacgtacagcagctggtgcgatctcttgcagtggagaacgacagcctccgtgaggtgatgctcacattctttactatgtgcagtttattatgtattctacttcaaattcactaactgccgtttggtacttggttttgctgtgagcaggagatgcgtactttgcagagagcttgcgctgcgctttcaaaagaaaacgacaagcttgaggtaataacaattttaatctgtttctcttttagttcttcccaaatttggcatctgggccagtaatggtgtgttttgggttgaatgacaaaagctgtgtcacttattttagcttaaagcctaatgagagtttttaaattgctaagggtttatacctccaaaggtagtggtccatatgatccagttcatatcttttaagcaaattaacttgaggctatctcactctgataagctatgcaatagacatggatatcattatcaaggctgatgggcctttgacaataatggatgtagatttttctagtcttttgcaaagtctctgcagaggtctctgttgggaaatgggcttgtcagttattaatttggtgtatgattgactataatcttagcaacaacaactgattagacgcactatttacaaaacgaaaaaaaaaatcattgcgtgagaaacagtagatgaattcagatcctttactctaggtcttcagaaataagttcgaagatacttagcaagcccagaggcaaattttcattcaaataacactataatttccttgttcactaccgcactaatagtatgctctggatagatatcattggccatcaatagtagtacatatgaacgcagttgtgttgcaaacttttacgatgcaagctgcacctttagaaaacctaatatttgtcttgttggatggaattgaacctcaccaacatctgagtacgtacctctgtagccgaggattagaagtatttgtcttgttgggatgaaatcgaccttcaccaacatctgagaactggcagaactcaactttcttggatagagcctactactattgagtatggtggttgtgactgatatatctgaccaataaaggaattgattgacttctggggcctgggcagctacacatggtctccaatattgaattgaaagctactcgcctgtttttgctttatactccatatttcccagtcatggagatgctaccctgttctgtattcaggacagcatgtatcccaattaatgagtaaagatcttgaaggtacagagagctgccactgcccacttataaatgatactaggtggtaacgatgttgacatgtgccacgatttgttgctacctttactgaaagccatattaaggccgagtttagttcccaactttttcttcaaacttccaactttcctaaatgagagtttagcttatccaacttccaaatttaaaaactctcattaggcatagcttatcacatcaaaacttttctacatacataaacttccaagttttttcttcaaacctccaattttgatgtggaactaaacacgccctaaagtcattgtgtctgaaaggtgaatgcatagtcagttggcaatgcattgtgtcatatgacaatgtttaaaatacatattagtgatgtgtacccttgaataatcctttttttcaagggatcttgtttgagttttggcaaatataataactggttttaccgatatttgaagtggaattttatcgctagtttagctcctgatgacctacacacattcccaattaataaatcctacacttaacaagccacaacttccaaaaatggtaaacaatattttgtctaccacatttaaaatagcctgcccacctaatcccatctcattcagttgaactgtagttgcaccaaccgggtaatttcaatttgatggatctcatttattaatgagaatatgagatataagcatcgagatggttccacccattataatggcaaacatgttttgtttgatacacctatttcatgcaaaataatttctacacaacgaatgctgattttgggggtccactgaaggagtattctttttctcaattttgcccatgtgggtgaagaatcttatgttctctcattgctgacgagttactactattgtttccaacaacaaccattgcttgtgaagatgctttgtgatattacccttgtggccttgtgtacttacaaccaagttggtgtcaaaatctgaacagtatagacatctaatgtaagttcttttcggaattgcagataagattacagatctcgagctcacggaacaaaccgatgattacagaggatctaaaaggaaagcaacagattgatcagcagtcagccacgcagtccatcggaggcggcttcgctcttccagatctcaacattcctgtgcaggacgctgctgatggatcagtccattgagctctccagattagtgcagctttgctgacagaatagcaagtgtacatagaggaattgcaggctagatggggggcacacgtccatgcgtgaagagaatgacacatttgattaagttgttagattacagggtctagtaccactatagtcccaagtgataagccaagttgtaggcttgtagccaaacaaaattgactaatttaacttcaactgatattgtttcacctggtgcttctatatttgatggagctgaagattgttacagctcaaactgattccagttctagtggaattagatgaatttattcatgctattttgtttcgatcaattgaaatgttaattgtgaagatttggtcgggtatggaacaatatctactcatttctctttgatattgctgtttatctattgttcgcctgtattgcagatagagtattagagcagagttctctatatgaataaaatgcaaaaggttctaaaaaattcgacgctgagttgtaaaatcccgaataaaatgcaaaaggttctaaaaaatttgacgctgagttgtaaaatcccatcaattggcatagcaatggcctgtgtgaacaatccagcaaacaaattgacgtgccgtttcgatcttgatgggctgaatttctcaaagaaggatagaagagcttaaacaatcattgtttcgcttacgctgtttcatcaataacaaagcataatttatgaataaaactttatatacattcttaataatttaaaagcaaacgatagaaaataaattacgaggaaacctcaaactcaagctaaaattaagttgtgaaatttaaatttgggtaaacaaggtagttttggggcgggcattttttccaagatgtgggccatgtgttgtcactgtcctgcattgtgctgcatgatcaaattgatcatcacttggctttactccctccgtcccacgatataagggatttttagtttttgcttgcaacgtttgaccactcgtcttattcaaattttttttgcaaatataaaaaacgaaaagttgtgcttaaagtactatagataataaagtaagtcacaaataaaataattaataatttcaaaaaaatttgaataagacgagtggtcaaacgttgcaagcaaaaactcaaaatcccttatattatgggacggagggagtacccttttcgaatggtccaaaatatcgcgtcaatctaattgaatccccatcatctccaccttcactttccacccgactcgcaacacgccaagtggacgcgatcgtttggggaaattaaactgtcatgtcaacaagaactttcttttattcttgtcaaaccttttccccttctcaaaccacggagtagttccctaacataagttaatttgctgaggaaaaaacatttcaataagcatggtgaaattcaagatgcacgacttcatatactaaagttaatattttagtatcagtgtcactagtgttttacgaggtttatgggtgcttccgaattaattgtattatttcttggccggacatgtaatcaattttcattatctaaatattcactgtattattccattttctactcgcagtatgctcaaacgtgcattcttatttatacttattgcgtctaagtatatatagtatgccttttataccaaaataattgagaaaaagttgatcatacgtttttttaaggaaagacaagatgattaaggagagatatatagattggcatgtattattaaggggacggcatatgttaatatgacaatagtaacatatggctttgcaaaagtaaaaatagtacatatgaccattaaatgtacaagtagtttcatggtatgatgataatttttttgtatcatttggatgattaatctctaacggttttatacacttttatgtaagtgtatatatagttcagcgggtcaatgcatgtcgctcgattcaaggagaagaaccaccattttctcttgtgcgtgttctttcttgccttaagtggctgtataaatcgcacaaattaggacttgtatggatcacaaaaattagaacctatatatggaattatggctcatacattgtacacccacatcttagttctgaccataggctcttagatgagttttctaacattagtagtttttttccctagaatcttcagctcctcaaacaagtttagattttcacaaagattataagaatatgcaactaaaaatctagaaaataaaccactcaatctgtttggaaatataagtatttatagggttcatattttctaccacaatataaatattcatgcatttatttccattatccacatcattttgatgattctgaagccaatcaggtgctttgaaagatttaatctaagcaattcaaaattcaaaattagcactgaactgactaaaaataatctttaaacctaacataagttgttctaacaatataaaaatacttatattttaaagagggagtagaagtgtagaacgtagaagctagaaaatgcagttttttatagattattactaaggtcatgtttgacatagttgaatttggattttgtattttagattttaatggtttaaaatttatagtgcatcttacaaatagaaacaaaatgattcattcaaatattataaataaatcatagatccaaatccataaatttataaagctaaaaatacaaagctctaataaaccttaaatataaaactatcctaaacaccccctctaactactcacgagctgcttgtcggaatcttgaaaatccttgaaacaaaaaaaagccactcctccgtttcatattataagttgttgtaaactttttcataaccaaatttatggaaaaaaatagcaacatctttaacaccaaactagtttttattaaaactgaaatttaatatattttgacagtttatttgttttgtgttgaaatgttgctatattttctataaatttaatcaaacttgaagaagtttaactaaggaaaaaaatcaaaataaattataatataaaacagagggagtaacttataactatatatctagacatagactttgttcagataatagttactccctccgttttaaaatataagagattttgaagggatgtgacacatctagagctagaatatgtcacaaacctttaaaatttcttataggacggagggagttcgagttagcttaggtattgtttagttgggaaaaaaatttggggttggttgtcacatcagatatacggatacacatttgaagtaataaagtaataataaaacaaatttcactagaaaaccgcgaaatgaatttattaaacctaattaatcatcattagcaaatgtttactgtagcatcacattgtcaaatcatggtgcaattagtcttataagattcgtctcgcaatttatatgcaaactgtgtaattggtttttttatctatatttaatactttatatatgtgtgtaaacattcgatgtgatgagtgaaaaaaatttatttcgagaagtaaacagcccctttattttgagacggagcgaatagagcacaagtcctcgcggagggtagtagcggagttcaccgttacatcgtgccaagctgaccctgcgaccacaaaagcaggccaaaagcagtggactcgccaccccaccatcaccacccaacccaacccaacctcctctcctatcgtcatccgctcttcttcccctcttccccactcgcaccaaccccaacccccccaaccgccgccgccgccgccgacgacccaccggtcgccgcgtcgccggagtcgcgtactggagaggggggcggagaggcaccagccgccccatggcgttccactacccggaccacggcctcgccatggacccgtcctccgccgcggcgtcgtcgcccaaccctagcttctcccccggaggcgggggcgggggcggggtcgggggaggggagagggagaaggcggccgtcgcggcgcacccgctctacgagcgcctgctcgaggcgcacgtcgcctgcctccgcgtcgccacccccgtggaccagctcccccgcatcgacgcgcagatcgccgcgcgcccgcctcccctcgcagccgcctccgccgccgccgccgccggtggcccctccggtggcgaggagctcgacctcttcatggtacgcctctccgctcccaggcccctccttatgcccctttccgcgtgcagaattttctgctgcaggtcggggaaacggcgatgggaggaaaagaaatggacaattaagtttgtttggattatctgcaataagatttttcaattgctttgctattgtatggactttatatggtagtagtagtagtaagtttgcacgtttcccctatgcttatgattggttgtcatccaaattggacaaaaaatctcaggataaagttcaaacagtctcactataccttgaaaatcaccacaagggtgaacttgtactatggttattttgttgcaaagcccgttttgttgttgtagatgactttgatatgccactgatgtcttagtgacatccttatagtgagtggcacgtagtggagatagttgaaacttagtggcatattgtggatttgtcctagtgattatgaagttgttacaagaattgtttgcttgaaaggattctatcacccgttgataattattgctactcccgcatccattgataccttctaaacgggacacagtcatataaataagaaataaatccacaaattcaaaggctcataaatctagaccaaaagctatcaaagtggaaaaatagctgaggcccatttctctagtttctgagatgatgtaaaaccttgcatgaatgaaagttccctgccaagattattgatttgctattaatatctgtgctatgctaatctcatctaatgacaataccttgttctcatcatgctgttaactggaaaaataagctcatgtattgatgccattacctctctttctacgaaatttgctgtgacgttatgacccctgtgttactccttatcttggaaatgaacatgtcattgtgtttttcacatggcagcccttcttgtggactctaacatacttctcttaattgcagacacattatgtgttgcttctttgctcattcaaggaacaacttcagcagcatgtgcgtgttcatgcaatggaagcagtgatggggtgctgggaacttgaacagtctttacaaagtctaacaggtagaccaaagcttctatctgcttgaatcagttcagcaaatggtagaaaatttcaaacatacactttttttttgttatttcattgataatattcaggcaagcagattgctaatttgctatgagttagtttcagtccaattgcaatgggaaactacatagtagatcaattgaaactagaaaggaaaagaagtatacataacattttcaacactattcatttgagaccaagaatgtatgttcaatacctttttaaatttcaaccatcactttggtaattattactctatcagaaaaaggagtttttgttgtgccctacaataagcttaggattaagcaaacttagatctcagagacaatccgtgccaacttgtcagcagccataagctaccaactattacgtaaaatcttaaatatgattttgttcattttctgagctctactacacatgctgatattgatcagaatctcaaaggcatgtgtgaggccttggtaacaattctgagttgatccaggcttgtagataacgctgggtaactacaattggagttgagtttgataagctagctgttcaccactttatatggagaacatgcccttttttgtgctcggatttgtatcttaaagtctgatacttcttactgaaggggcctagatgatgttcggacaactgagttatgcttgtatgattggttctgcaggggcatctcctggtgaagggactggagcgactatgtctgatgatgaagataaccaagtggacagtgaagccaacatgtttgatggaaatgatgggtcagacggcatgggctttggtcccttaatgctgaccgagggtgaaagatccttggttgagcgtgtacggcatgagctgaagaacgagcttaagcaggtagccttttgtcctttgaaatgcttcatccatcatcgtagtgcattatttgtgaaccaaaatgtcctgcctgtaggggtacaaagaaaagcttgtggatattagggaagagatccttcgcaagcggagagctggtaaacttcctggtgatactgcatctatactaaaagcttggtggcaagctcattctaagtggccatacccaactgtacgtggcaccaacattccatttccgtaactttattattatggtatcaattgtgggtcatgacgagcaattctttctacacatattcaggaagacgacaaggcccgcctggtgcaggaaacggggttacaactgaagcaaatcaacaattggttcattaaccaacgcaaacgaaactggcatagcaacccagcatcctctggtgaaaagaccaagaagaaaaggtaacttataggaaaattatgcctcattgttcattgttccgtaacaagctcgcaacattgtgtttatcaattctaccctgttcatgcatgtaaaaaagaaacgttacaggtgatggtggtgctgagcaatcgtggtagattggttcaacatgaaactagatgtaaacagtaccttttattgtgaagagtgtagtacattctctcgtgctctggtgtgacaaaatctggagaccggcccattcacaagggaattgcgatcataggcgtaatcactgggcaaagaagtcatctgaaattgtagcataagcgcacaaaactgaggtgggtggtatttgactttcgcagtatagcatcgactgtctgctaatgtgattttgtgaaggaatgttctgtataaccgatgaacggaaggaagaattgtattgtgtatgtaattgtgtatcttatttatcatgtaatatatatatgatattaggagctttaagattcggattggatatgttctctgttttgatgcacgatgcagtgttgaggtgtaacatgttttggtaattcactgtgtataaaatatcggagtatatgtgcgtaagcttttctatactagcaaggcaagcatgcaggcactgtgccttcgatagtatgatgtttatctttatcccttttagcatttctaactttgagtctacatagttcatccgtaacaaatctattacgtgtaactcaagcttaagtccctggattatgataatattaaggggagagaaacttgtaattaagcagctgtatctggcacattctgctggcgatgcaaactggcttctggtgtggtgatggctacggctagacaggccagtgaagcagctgcagcctgcacattcctaatttcctactaattcctaagacaaacgagccttaattattcctagaattggtctaaatcgcaagtagccggcacgcaaagtccaagccatgtgtccatgtagccttgaaggcttgaaccaaacaccaagagcgaaatatttgtctttgcttgatatttttctacggctcgctgtcaacgtcaatgcagctaatcaaagcttgggttggcctaggatagcaggttcaataattaatcgccaaacgacgccaaattacctaggacaatttagttgtgcgtccagctgtaatcgttgcagaaatatcaagaacttgagaatcatttatcgtacgttcatctccaagaatttcgatgttgatcaatcgtagtcatcactggtaacgcatgaatgtgatgaatgaaaacgttcgatgcctacaagaatagaaaaaattttgcgttgtaattcgaactcgcgaaacctccaaaagtccaaatcaaacactgatcattcgtacatataatcaagtttttacatgcaaccatacgtgctacacactctgaactattgcttcttaatatgtgcatggctaaatatatatatactcgcatatcctctgcaaccgatcgaagcttccggtcgccggaggcttacacggcggcgatggccgccgccggcggtgagaagctccggtagagaaggccgtcggcacggtggttgtcgccggcctcgtagtcgtcgtcttcgtcgtcggcggcgccctcgtcgaagttgagcgcgtagctgaggggatcataccggaactcccccggcgagccgacgcggcggcgccactgcgccaccgtgtcgccgaggccacctccgccgccgccgccgccgtagccgaagcagcagcacaccgtggccctcagcctgtcacgcagcgagctcatcggcgacggcggcgaggcctccgtctccatgaaggctactcacctacttcttaccgagctaagcggctcagatcaagtagtaagcaaaatgagtggtaatacggtcaaaccgcctgtgattagcagtaaccaggcaggtttaatggtgattaagtagtagatatgatcttggaaaaagacggaaatgggcatgcatgttagagcagcaatgtgtggttggggtggttgggggtaggggcagatagggaatccagcatcttctgagagaattttctttggaaaaatagtcaaattttgacatggacaggcaaggaaaattgtccagaaaaacacactgtacaaaggcttgatttgtactatgcatttgagaagccaacaagtatataaccatggtaacacataactgtcattattagataataagggagcaaagaatgtacggtaaggccagtaacagactaatttctgatgctgaaatacagcttacggtaacaaatctcaatcctaatttctgatgctgctgttgctgcttgcagatgattcagatggtaccgagagaattgtgctaccgtttatatcgcttgacattgactctgaagcttctgccacggtattttggcgctcaaaatgggctatcaaatcccttagctgtcacaagaggatgatgggtcagtaataagccttctaataagacaatggtaaaactatgcatactgtaaacattatgcagaagattgcaatcataaacaacgtgaccaaagaccaatgcatagctttctcttttttgttctttggagatgtcagacagcatctatttgcaacacaaaaggtacctcgtgatcatgagatacaatgctacaggggattcacttatgttatgtgcataacataacttaaactttatgcaaacaagggactaaactatttgattatagtacggtcttatcaagcaagtgtgatatccactaacaagtctaaacaagacagcactaaggaacaactctgcacgctggaggttctgagttgctaacatgtggtaacatcagttacatatccgacttatccgagataaaaggcacgcaatatcatgagaagagaagcataaaacttgctaaaaaacaacagttacgaaacatactgacctcctcctccagcttctcaattttttcatctttcaatctaatggcagcttgttccctataataaaatcaaaccgatttttgatcatcagtaaaacagaaactataaattgagatcaactcaaattctaaattaacgcaatttctgtccaatttcaacaactgcaagggaattataaaatgaccaaatatccactttggtcactcgttacagcatatgagaggcaatgaaaacatatgcatattctactaagttacctagctggaataggacatgattgtaaacaagaattgattcataagtcgttcctgtgataatttgaaagatatcagagaaaatacctttcttttactttttgaattctctccctccacatctccatgttttttacaagattttcatgaatctaaaatatatcaaaataattatgagtacgtaagtcataaagttccctgaaggcagtaattctagagctacagtttcagatttgatcttaacaaataggcaagagcttacatcattaagaaacccggtctcttccatgcacttatcaagctttgcttgtaacttttgtacttttatgcccactgctttctcggtagcagcagcaatttctttctcattatcctctttgacttctagcaggagtgattcgtaatactacattagcaccaaaatcagaatgtacattagtactaaaaccaaaacttacatggccaaatattccatgttaatgatctgacaccaataattccttggaacatactccctttgtcccccaaaaagtccaatcctagggacgagtccagattcatccccgggattggacttttttgtgggacagtgggagtagataccagcagcaagtgataaaagcgttacctaggtgataaagaaacatcaactagacaaacgaaataaagcacaatgcatttaaacttacatttctttgtttttcaagctgagacgtgacgagatcattgtactcctcaacaatctaaaagcagggaaagcgcgcagttgtaagagatggaaaacaaaatgtactacgatggtatggctagtgatctacaaactttatgtactcaatacattacagcttccattttactgtcgagcagagcttcactgatccccgcatcaccattgcatgttgaacacataccatcaactgaatgatcaccatagaaattgtactcaaccagattcccatctgttttcgattgaatcaaacgatgcacatagttgtccccagcataatcccaaaccttctgtgtttctaattcaagtgaataacaatgttgcgtttctttccagtgttcaatagcatgaccacctttgtacctttgagaacgttaatccccaatcaatcaaataagttgtttacttagtaaaattcacatcttccagaattaacatgaaataccttccacatccaacatggccacagattacacaaatccaaagattttctgatgttccacaaactgaacagctggatttctctggttcttgttgacaatacctgcaaacctgcacaacactttctgtaaacacacatagatttgtttctaaagccaggataaaacaaagaagcaatgaattcaaattatagaatgccaaccaatctcctagtaagtattattttaaaaaataatgtagttgattgccataaatttgagataccagaaacttggtgacagcaaaagttatgttgatagaacagtatgatgatgcccttagtaaactaatatatatatataaaaaacacctgtagtaagtgagttgtcttaagatcttactgggcacgaagagtctgcccactttgacatgcacgaatagtggaaagaatggttgcatattgttgtaagaatgcctccaggatcttggtcaagtcgttctattgacaataaaaacaaataaatggtgtgatcaatgtgagttcgaaagctatactttgggcttaaataagatagtaaatatagaaaactactcctggttgcatagacatgctttgggtatcagcataactctcaatatacacttcgaccagtaatatctattgtaatccatttataaacctgataaaattataacattatgaaagtaatctttgagacagatacacacatggttttcatgtatcaaaataaaaaataatggcataccattactcaaaatttcgaaggttgactacatgtaagtccaaagtggcatatgtacttgtggctagagggagtaatgatatttttaaaaagcaggtgggtgaacatctctaacttttaacttaaaaaatacaatactgaaagctgctgaggtattccaaatttccctgaacagactgaaagaacactacatcatgaaaatttggtaaatttctagagtaactcaaaagacttccacataccaagacatactgggcatgtaggttgttcagctgagcttgtaactgagctatgtgcgtgctcaatcaattgagtgtagtgaacgtcttccacaaaacgaacacggcaaacattaccctgcagcacatcagccccaaatcaatcagcacagcacacatttactcagagcggcagaagatcgaagtgctcggcagaaccaaagcaatccagcacctccagtgatgagaaccgattcccgttaaagctcatgtagaagctatccgtgaagctctgagtgtcgaattttataagaacgccgtactgatcctccaccccatcaatcctacaaacatacccaccaattaacactccaattcacacatacatcagaaccactcatgcacaccaaaattggccaatgtttgaggtctgacgaaacgcgcaatgagcccatgtctactactactactactactactactactactactactactacggagaattatcatcagcgaagctttcacccaactgagaatcgagacccgacgatacctgatgatgcgcgtctcgaggatgtgggaggcccaggatgcgcagaagcggccgaagtcggcgtaggtcaggtggttgggcacgccaggcacgcacacccgcggcttcctccccacctggcaagacaagcgcgcgaacgagaacattgagaaggcgattacgagggccatcgaaggggaggagggggtggcttaccgggagaagggacgaggacgaggcggcgggtggttcggggtggaggaggacgacgccgcgggtctcctcgatgcgtgggttcccggaggagaagggcagggagtcgagcgcgctggcggacgacgaggcagagccggatgggtcctcgccgccggaggtcgccatggccggcgccgcggcggcggcggcggcggcggcgagaggaagagaaaatctctctcttcctttcccaagggaggcgttgcttcctcgagaagagtctagagttgttttgtgtcgagtaaatttcatcaaatctcgttttatggtcaaatacataaaacccacgtcagtatgattttggcgtataatcacgtgttttatgatttaaatgttttggagtacaaaacttcacccttttcaaatttaaattaattttggcatatctgaaacaatgcttgttgaagaagggaagagttgatccaacaaccttaagtaagatgtcaacaactaaaagtttcaaatacaatctatattttaaaaatcttagtaatgtttgccgaaatggagataaggttttgtgatacatttatgccaccagttatatacttgaggtttcatgggatttctgaaaatttcacttttatgtcctactgctgacggtgtgggacccacctgtcagtgacagagccgagccgtggatggtcgatcgcaactcgcaacggaagaggaagcgagcgagcgatcgatcaccggcggcgtagtggctcctccggtggcgcccgccgccggcaaccccagccgccgcctcgtgacggttcggcgcagctctttctctgaggttgatgcgaggagatcgcggtggggagataggggagaggccagtggtgagagcgttcgagaattggttgctcgcccgccgggtgttcgacgtaatgtcgcgccgggatgcagtgcaaactgtacagatcgtcgttctcgcgggtgccggatgcggggtttgctacggcggtgtgttcccgcgaggtgcaacttcagtgctgaaattttgatgcattgtaccgatatatgaaatctttgtagtattttggggtgatggcttacagtttggggaacgtaccaacttagtactgagttactttggcttaggcgaattcacactgcaaatgtcctattttcatcttccgcgtggattttatttttcttatcttaggtgcggatttagcttgaatatgatttaattaatgtttgagtattcacatttttgttgtgtaactttacaggaaagctatctcactctcagctggtagggctttaatcaaatatcatgtgttcgtgtctgccgcgtaccatcacactatggatcatctatatgcaattatgggctgtcccattgggcctagccctctaggttgaaatttgtgtctcatttggcatgtgcggactttggttaaaaggctgattgaaccattgacttcatgcatgttccaggttagtaattcgtagttctgagttcagtattcaaagtgcagcaaatagttgatgagtaaatacttttccattcaaagcattgtggtccctgagaagctgagacaggtatcttcatgctatttttccgtgttagtctagtgtctgctattctagtttagcataactcatcttgcagattaatcaaccaggtatgatcatctagacctttattacagactaagaagatatgttctcatcttggactgagaaaaatgtaaatgctattggtcattctcttgtatccatatactgaagctgtagcctcagaactattcagctttatactttcacagtaaaactctagtcttctgaagtgattataatgttcttaagcaatatttgcataacatatataaaaatagtcagatttttttgaaccttggtttcaaggtgatattaaagacatgcaggttcctaaatatacttcaaaatatttatgcaatattgtacagtactctacgagtagcagcctgatagtatgtgatatcgtgatccatatcaataaaatactctgatatgtcatttatttttcataaattagcacgtgatacaaatggtttctcacattattcatcattttgtaaacatgtctgttgttcataattgtagctaatgcataactaaccattgtttctaataacacttattagctttatttagctctacctctggtagcaagttacccttttcatcattatttctttgtcttctaggcaatctatagatcattctaggacattgtttcctttcaatgaaaaatgcagggatcattgctccagttaaaggtggagtaggacttaaaactaccataactttcaaagagaaccctatctaaacacacccctaacatctgagtcagtcagctttctgggaccagtcctatcttgtaaatgtggttgccagcttcctgacctattgctactttcattttgccaggccctgcttcgtacaacctggaaatggcaaaactaattagtaatgaatattaatcttcatcattacctgaaaatagcaaatcagacgagagattatattaatttaatgccagatctggtgtgattcatggctaatcagtagaggaaaataatttaccaacctggttatactattcagaatatgtcggctctattgtgtacctaccacctaccatgtctgcagtcaacatatctggagatcttcacaaatcaggtttcaactcatcctttactatttggtaatttgtactgtattgaccgagcatccccaaaaacataaaatgatgatatttcttaatttggttgactgtttgaggtgattagcatggctgtccttcagtagttcatgtggttgacttcacctattgtgaagtgtcacccatatatctgtgctgtctgagaaagggcacactgagtacttattgggttcagatgctctatgcatagacacttctgtcaatgatggagtgttgctcatggacttgataggagttacattacaatactactgttttctgcttgcataaattcttaattgattttgggtacttaatttttcatttcagggatgtaaggaaaagggataatgcactgttttactggaactatatagaggaaattgaagagcatagaccataaactagctctaagacttgaatgtccaaaaattacagcttatgaggttttcattaaaaaggaaaatgtgtgggttaatatgaatatctctatgcattgaacaatttatggtttatcacgtcagaattcatctaaaataagagcttatggactcacaatctgagatcttattagatgtcagatatctcagttagatatgtagaatagagaaatttctctgctaaaaaaaaaggaacaactttgcaccttacatttttgaatcttctgtactcaacatattctctctcagacttctcaatgctgagtaccgaagttccactaagtcagacgagatcgaatgtccaaactgtgctgctttagaatctagttctcacttgatacatcattttctaggatgattcaccaaaaagtgaaataggtgttcttatattccgcaccttgttagaactataatctcttttaaattaatagttgtaggtactactgtggtatttttgaaacattgagtttcatgcttcatcctaagatttgaaccttaaacacagcagttttctgcatccaaatttctcaaatttcctggattttattcccctcactgcaccccaccccacaaatattttatgccttttctatgatttagtgaatgatgccaacaaattatgaacatattgatatttcttcttcttaagacttccatttccttggtgtattactactcttccgtttttccccttttacatcaggctattatcttgctgcatgtacctgactttgccggaacatggttatgtatttttaacacacttatgatatgataacatgacttggacaaaaaaagaaagcccatttcatatgatcataatggtatagccaacttccattaacttgcctaccaggcatgacatgctcaactgccccgtaggtatttccccttcacaaaagagtgctaatccaaatctacgtttggatccacagacatctttaataatctttaatcatttacatgatatttgaaaattgtatctgaagttttgaatttactcttctgtaacttgcatgttccccaatcaccaaatttttctttacctttgaatgttaatccttccgatttaaatagattagagagagaccaataaactagatggtgcttgtatcttcgctatgtcaaggacaaaacacaatagacaatctaagaaattacagcagttaaaatgcttacagaaaatccagtcaaagtcaaggagagagaagccctgtacctgtaactagaccgatccttttttataatcatcatcataggaggatgacaaagatttcactgtttaagtagacattagattatcttaatatggatataatatttagtcgatgacgcgcacgagtgcacttcccgagctttccagctatatgcgccgaatcatatcacgaggtgcatggagaaaaatattattcttacgttctgatctcgagatgatctgagtaggcattgctgagggcttcactagttaaaactagaattgctcaacttccaatgatttcaagcttattttaactttgtgttcctacccttccctgtgaagcaaaacgtaatcaaacaagaagcatagtgttgtctttctctgatatgattgatttcatggaggctttacagtttcaagaagtttgtatattctcttaagatttgttgtaggcatgaaaagggcaatacaatgcaaggtagaccgagaattttgcaaccttgtgtttggtaggagaaagctgttattctgtcagttgatctttagaattgcacctctgttaagttaaacacacctatctcctatggaaactaacatagctagctagagcttaacatttgttacaataagaatgtatctgtagcatttgtaggctgccatttttagtacccatctcacatttctaatttggatctttaccattcagacaagagcttgaaacattttttatatccatggggctctgagttttcgctggttttgtagttgcttaaacatagctgaatatttagcaacatatgcttttattgttacatgaataacttttaaggtaattacaagaaaaaactggaattatcaaaattcctctagaaatgttcgcagtattccaggtccttgattatattaaaatgcattttggcatgatattacttctttactactactatttgttacaagtgacagaaaaatttttcagtctccaaatactatttggtccagattgacactctctggatagaattattgaatttctttgctgatatccaaatttgtgaattgattattggccatgcttgtgcacatttcaataataaaaatggtaccctctgccataaaaggtaatttaacataatggtcccattatcatatctaggtgttaaacttaactaactaatgaccaacccaaaataagtccagtgcattttgcttcctctaaaataacagtaataccatactaagaagaaaggggataatatgaactattttaaggcgtacatatatatgaactggtgcatctacatgaagaatttgagtacaattgcctctggtgatgtacattgaaatcacagggttccatggagacaaaattctgtcaatagtgcaccagctttgtccaagagataaagaactcaaaaaaagcaaaaaaaagggaaaaaaactatttaattattgatcttttatcagcacaaaggtgatctatgaggaacaccttttcttctgctcatgtttgttgccatatcatcatcagaaactcggtttgcagatcgtgcacagatatatggtccactccgcttctttcggacaaaatttgggcatggtgcactcaaattctctgagtctgatgatcccatgggctcgtcaacatcaacaagggttgagtgcgttgtctcatcatcagcatcatgaggaatgaagaaatctggaccaagctgcaaggtcttgcatggacgcaagtatgctgacaggtctttcttttgccgtaatatatattccacctgaaatggatgcataatgttaataatttccatatgtgctcccccaaaaatctaagtaagctcaaattgtgtttaatgactatctgaacatatttacatattacaagtttagaatacatgcatactacatttaatcttaacaatgcatattgaaggaagttgttatatattaaggaaatgagaaattatcgaagctgagatcacttgcaatatggatatggcacataattgttgcatctgaagcattttcctcttggtaattggcataaagctgctaatatgatttgttttttttttaaaagttctttctagttctcagttaatctgtgattggtttcttcgggtagccggaccaatgtgtatatgcatgtgaaacaaggtaagataatgttcttcctaagtgccttctagatcataattccataattatgttatcttatttagcatgctcatgctcaccgaaattcagttgcatctaaacacagaataacgatatcataattccagccaatcaccttgcaatccagagagcagtggaaatagggttcttggaggcttctatcgcaagaggtgcagatattccctgaccctttaaattgcctgttctgtggtcttttcttcaggaaaacgacctttgagctgttaattgtgtatgactgcaccatgtagatacagaattgtaaggctgcatacatattaacccttgcacaactatcaaacttgcatgcatgcactatgcatatttgatgtacctgaacactggagcaatcgatcagcttctcaaggtcctccagccggacaacatcatggtagacgtagcgccgcacctgcagtagcctgtgcacacggtgtgctgccacacagtgtgggcagatgctggtgcagcagtcaaggcaacagatgttcttctcattcttcttcgcatgctcatggaaagagcatgctatgaagaacttctgtgtgttcagggcctctaaccatgctggcttccacatagcctgctgaggttgcgaaattccaagtaaattttcaattgatagagagaattttcatgatagtatgaagaagtttggaatcctcaccatgatcatgtgtgttgttgatgtgaaatcctttggtgttgtgtgtggttttggctgggtgagggtgagggtgaggtgctgtgaggaaggaggatacgtacaacttatgaaggatgagaggagggggtgtttagtgggataagaaggattaaagattcaaccatagacggggggctatatatttgcaccactagggcttttgacatttgactccttaatctctggcactatcatggaatgcaccttgctttatgaaagggtagtgatagccatgtgtagttaactttgtgcatcttattaagaacatgttccggaattgccgttgtaggtgctggatgtgatattatgataatcaaatactacattttacaaaatttagttttttattggaccatttatcttaagaggttagagttgattcaaaaattccaataaaattctctgagattatagaaaaattgccacaaaaggttttttttcctcttagagaaaagtcaactaatctatcatgattttgtcaggttcaactcaaaacagtactgaaattcaaagaatttacattttacaagactgttcaggattggctagtgaagcataaatcaagttcgccccatttagatttgcttgaccgcaatcatacaatttcatatgcaatttaggtgacatggtaaattattgtttgcgttattaattaatttaccattctatcttctcctttagaaattatgacagactaccattcaaacagataaaatgtgcaatcaactgttaacatggtttatgtgggtaaaggctttatgtagaattttagtcacttgggatattactcctcagcaacatatattgtctctcttttttccaacaataaacaagaaatgttcacaaatgctcatttctggtggcattgcaacatggaaaggtctggtgttttaacattaaaatctgctgcatctcttggggattggaccaatgtgcatgacttgtacatagtgagccaacaaagcatacaaaaacaattatataaagggtagaaagggaggtggggaggtgaggagaacgtggatgctgtttctagtgtttcccaatccttgtccaaactttttaacttatgaccaaagctccaatctctagtcttggctatagagctcaccactcttaaacaaatgcagtgcccaagaagccctttgattccttgtttggaggcttatgtgtgggggagaggatggcctttcttgggcaacacatgcatacaatataaatcaccagtctccactaacaaattactgccttgggctttgccccatcgtgtttgctacaggctagctgttgttttacttgagttttatatctcaaatggtaaactacaaaaactcaaacctgttatgcattctgtgattaaacttttttggaacctacaatctgttttactcttcaacagttcttgttttgaatacaaatttgaatgctatgcaatggagataatacaggtacaaatacaatgtagatttgaactttttctttatggggtatatactgtgtacttgtgctgtgagacctttctaacatggtatatccaacctttttggcctaagttactactcctttgcactaaatagataaattgtctctgttttggtgtttatacatgcaagatttcctgatttcaaaagataactactactgcttaaatctaacagctgtgatttggcttgacttctagccttccaggtgtggatttgatgaggactgcaatggtctgtcccaggtgtgcttctgtcaaggttcgcaaaagaataactttgcatcatgcatagagttcatttttctggactgtaccgatggatcagagttcctgatgtgatttatctgacgatgcatcctaatattctgaactgcattgcagagattggcccattgtccctgaaagggtgagttgatggacagctcaccttaaaatgtctgactggtctttcaactgtggaagtcaaacggaatattaagtgatatatatcatggctctaacaaaagcaaaaacttttcatctctgataccttttgatattgtgtaccattcatgcattttctcttaatctttccatgttcacctggtctccagatacaaagaaagacagttctttctcagtttctttagagtcttattgttttgcctaaagccgattataaaccgtaacgcttatcagcgacaaaacttaaaacttttatgtgtgtgctcttagcgacttaaaaaccaatgctggaaaaataacatcaaaatcactctaaaattaagttttaaaatttaattttgaatgtatctgatttaattttggttgtttcaggaacagctgtttcatcactccctttctctgcacaatgatggtgttgaatgcagatgaaatggggattagaggagaaagtgtcagataaagaaagcatcagaacatgacatgtgaatgaggtacataatacgttgccaatgctctgtatatatcatcagtggtgcatgcataaataggaaagctacatcgagattctcctttctaaaatgcaaagaaacctgaagctttattcagagagagattggaatttgctaaagctttttatttattttacattattatatttttatgacaaggctaaagcatgaattggggaatgggatacatgcatgtacctatcaataatccatggaataacaacaacccggttcttgtgatagcaaagctccaaagcctacaaccttttaatttcccctagcatccagctactaggatttgacctaaaaatcacgttgttaatctgtctaagcaaattaaggaccagctgctaattagcccccatgagtaatgggtaagcaatggatgttgttgtttcttgtttctagctgtagcctccttgtaggtcaccctattatttgatcatgcatctggttttactactagctatagcttgttgggtcacacactacacccaagtagacatctcattataatattataatcatgccattattttagtaaatcgcagtaatctttcatggttctaacacatcactttgtcggtcttacggtcaaatctctccaccggactgcaaaggccacccaaaacccctccatccctccaccctcaacctaccgccacccaatgacaagtgggcccacgtctcggggccccagatgccagtgtccgtggtcggtgatgtacggccaggattaactggtgacagtagaaaaattcgatggtccacgagatcccaacttccaactcctctcttttattttttttaattttaattttatagaaaaaatacccgtacatggtaacgggtgaagtcttaggatttgaatcacatgagaaaatcatgagctgtggttaggagtttaatcgtctcacgttaatatgcaagttttttttaaagagatttcttacatgactccttacgtatttctaaaagcgaacgaaattacaaatatactcatacacggatgacgtaccaaagtatcggtaaaaacatctttaatttttataatagtacttttctccttttttagctttcgctacaaccgctgcgcatgtgcagcgcccccgcacgtgtgggcgtacgacctttgcgtagaaaatccaaggcacgcacacgtggcggggcggtgggccatgagggtggtgccggtcacgtgaggggggtctgacacaagggggggttaatgcggggaggcgcggtcacgtgccgcgcgtcgggccacgcgttggatgggatctcgtgtggccgcctcatcgccgtaggcctccctgttgctgttgctgatcggctcggcgaggggttaattgcactatgtttggtttagttttttttttttttttacaaggccttgagatctggtcagtcttgtattgaaatccggagctatagaacacgaatctcgagcatggttttatgcatgtattttaagcgtaattgaggggactagagaatgcgacgattaattagctcattcgtttgtactctctccaagttgatatatttcatatttattttttatgtgagttatttctatttgtaacttttaatgtatccaaaacttaaatggaaagctaaattaaatgtttgatcaaaacctgagaaatcatcttaatacttatcggtcacatgcatatatatacttcttgatctttattaaatgcaagatgagtttttttttcttggtcttgtgataaaagaatgtgtaaattttgtaaaaggagtgagtagtagtagactatttcttgttgtatcccgagaaggacgtgtaaacacatcgaaaagaagaactcgagagcttgttggattttcgatttgtatcacactcaattctgaattgatgtactactaccatctgcacaatttaaaggatttcatcctccaatgtggtatcttgttctcctttcttccataaaagttacattattatcatcaaaaccaaaaaaaattaactcatcttgcatataataaagatcaatgagtgtatatctgcatgcaaccaatgagtattaagatagctgctcagattttgatcaaacatttaatttaaaacatttaatttatctcttcatttaagtgttggatgtatagagactgcaaatagaaataacttatttggaaaaaactaaaatataaaataagtaactcttattgatgaagggagtaccatttgcaaaaggtatgttggtagtacttgcttctgcagcagctatcgtttccggtcagccccaaaattcaaaggatttcgtcgtccaatttggtagctacttctgtatttattaggtactaccatctgcaaaattcggagttcatggcgagacagttttgaatttttttcatttttaaattttttttcttttaatatttacaaaaaataatccagaccctgccgccctccactagagcggcaagctgacgtggcaaatgggggagggacgggcggtgacggcagacgggagagggagggttttttttttgcacgaaaacccttgccgccccccccctttgcaaaaaaagctagcccgggactagtactttttggctggtaccttttgcatctgggtcccttgccgtcctctggtagggtggcaaggggcccagatgcaaaaagtacgagccaaatgctcttcagggctgcaaaaattgctttttggcagacggcgccgtcgagctgctgtctgccacgttagcttgccgccctagttgcgccgatagattatttctgtaaatattaaaagaaaaaaatttaaaaatgaaaaaaattcgacattttttcattttgtttgtcggtgcagatgtgatgggaggagactctgttctgcgtttcgggctgtgtccctgcttgcccgtgccaattagccaaagttgaggcccatctaggccaattaatgggccgtgaaagcccatttagaaaagaaatgggcaacgcgactggaccaatgagatcaataattgaatgggccatatataaatggaccaagttgctggcccgttagcaacgagctccattgtggcgtggacaatggaggatgcggccgtcggcgacgagctctgacgtgggacgtggacaatgggaccactggcgacgatgctttggtgtctggagtatcaggacatactccatccgttccaaaaataaaaaaacctaatacatgtgtctagattcaaacataggattggtttttttttacggaaaaagtataccttagagatatatgtcctgatacctaaccggtatcatcctatcccaataggattcagttgtacgtcctaacatgattcagttgtatagtaactctctagatttaattggccgattagcttctatacagttatagtggcacggcttgtgattttcaccgaggataaggtcgaatttaaactcagctgcacaaaaacaaacaaaagcaaacgccgctcgattgtgtcctatcggattctgaacagcaatggctattcatttaagtcttcagatagatccaagccgataagccatgggaaaaaaaatgaactatgatgaaaatcctaaagtcggctggcaattacgcgcgactaacaacgatgataatttacagtcggctagcaattgatgccatgaaaataaagattagctcaggcaaaaaaaacccctaaaaccatccgttcgtatttcttccaacaccgttgcgacatacacacatgacactagtagatgtaaaatttaaatgtctaaatacttataactatattctaaagcagtttttgctatacatttatctataaattgtctcataaaaatttgatagtgtaaatataatgtgatcattgtgtaattacatcataacttacatgtaactacaatataaatacaacttgtatataattttaaaagatcttgcgataacatgctattttcacgaggatggggtcacgggaccaaatcccctcacttatgtgtgcgttgtgtttttttttcgcttgcacaaatcttaaagtaaatctaattgtttcaaaattaaataaaagttacataccagttacattgtagttacacttaagttacaatgtaaattacattgtactccctccatatattttttgatagtcatatttctaaatctgaaaaatttatttttgataggcatattttaatccaacaacctatcatcttaatgactttctcggatttaatgcatgactctccattcttccacatatgattggctatatggtcattgagaaatgtaaatattaatgaatcgcttgtttacgaggaatactagtagcatgtttaaatagatgataagtagaattacttatcattggtctgtgtgccaagataaaatatgattatcaaaagtagatggagggagtactatatttacatcacataaatttttaggagaagatttattgataaatgtatagatggtctcttttaaaacgataataaaagaaacccaccaaaataagcgcatgatatgccctattgtcaaagcctgtaacgtggtagcatgcacatggaacatggctattttgcatttatatatacagttgacggtatatttgcttgtatatgtaccagtacatcagaacatgcctattttttcagctatatatacattgtatagttgatggtatatacattgtgcagctagtataatttatggctaggttgttgactggctacataagttacgtacaatacagctagccacgcaaatgtgcaagtgcatgcaaccgaagttcagcttcactttccactggtctcaaatattgcagccgttgcaggctaaattcatcgagaaaatgaacatttggctacttttaaaaggcggtttcgctggaataccatcatgaaaacgcgtttcgctaaaataccaatatgaaacgcgcgatcacagccactttgtcattttctccattttcgtcattttcaaatccattttcgctggaatttggcttgatgagaccaaattgcccctcctcatcggctgaaaggggatcaagatcgagcgcggcgaggtggtcgctgttgctgacgagggcgtcgatggcagtgtgggacggggcgagaccgagcttggcggccgagcaacgcgagcgcccccgtggccgtcttcatcggcgctgggacgccgccacgccaaccttctctccccatccacccgacgccgcctggccgccctcaggccgccaccgtgctgggccgaccgtcgtcgccttggcccggtcgccagctcgcacctagccttgccgctgcaccagccacgccccctcgccgcgtcgagcaaagaagcgaagaaggaagagagaaaaagggaacgagaggagaaaccgagaggaagaggagaagaaaagagaagcgcccccgtggcgaccgccgtgcgggtgtcgagccagcgcaggacaagacgtagctggtcgtccgggaggttgctgatgtggtcctcgccatcatctcctcattggtcacccgctccatcgccgggcggagcatgcgaaggccgccgcggcggacgcgcacaatggggagaggcggcgcgccggccggcagcaagcagcgttgccgccccttctctctgtctcctctctcaccgtgttctctgagtttataaggggcaattttatctcaccatctagtagaggagagaaaatctttttgaaaataaataaaatggcgaaaatggcaaagtggcagtagacatacgcttcatgttggcattttatcaatcacgttttgggatgacattctagcgaaactatgttttgaacatggcgaaatgttcattttcttaaattcatcaccaggtctcgttagattttgatcaatgattagtccaaattatacatacatctagtgtactaaaatttaatggcagattcatcacaaaatattggtatttacagctactagaacatatttttatagaattaaaatattggtatatattatacatatgtttaaatgtatagtaatattagggatgtgtcaaatctgatacttcatctgtcccaaaatgttgatatctaatataggatgtgacattatctagtactatgaatctggacagataatgtcacatcctatactatatagctatattttagaacggaggtagtactgtattttgacgtagtaaaacatatcatatggaattaagggtcaaagcataatttaatcccttttttttcaaaatgaaacagttctgtaaaagtagaggtattagcagatttttaatggaccattgtagtataagatacaactcatttcattactgaaaataaattagccatggcgctcggtgcatgcaactatgcaagctggaatggaattaaatttgcaagagtcaagaggaaggaaggaaggaagaagacctgttcgtgcccaaatttcgaagccaacaaacaaccaaccgaaaaatactcacaaattcattgccgatacttccgccatctcctccattgccgtcgtttgaaattcaggtagaacatgtagtagttgacgccgcccaatgccgttcgtgatcatggcgtctcgtgctcctcctcttctcctcctgctgatcgtgctctctctcgtcgtcttagcagcattgctcgccgccgccgccgccgatgcatccgcaggtaaagatttcgtgtgcattgtctgatttatcgcggcaagaagtgtgaaattttgatgtgattggtggcggcggcggcggcagtggccggaggcggcaggagctcgccgtcgacgacgacgttcgtgctcgccggggagcggacgcggcggaaggatcctctcgatgggctgaggctctactccggcgggtggaacatcagcgacgagcactactgggccgtgagctcctcttcttcttcctcctcctcctcttgatccatgtccatcctccattcttgttccatggccgtttcttgattttattctgagctcgtcgttcgtgacgacgcgtgcatgcagtcggtcgggttcacggtggcgccggtgttcgccgcggccgcgatctggttcgtcgtgttcggcgtctcgctcttcctcgccggctgctgcttctgctgctgccccggcagcagccgcggcggcggcggctcgtactcctgcacggcgctggtcgtctcccttgtcctcctcctcgccttcaccgccgccgccgcgtacgtataatttctccggtcacctcacctcgccgccggtgagtaaactaaactaaccgccgccgccgccattgtttgcagcgtggggtgcggcgtgctgtacgacgggcaggggcggttcgacgggagcacggcggcgacggtggagtacgtggcggggaagtccggcgacgcggtggcgagcctgaggggattcgcgagctccatggaggcggccaaggcggccggcgtggggcccgtgtcgctgccggccagcgtcaaggggagcatcgacggcgtcgtgcgcaagatgagctccgccgccgacgagctcgcggcgcgcatggcgagcaacgccgccaagatccgagacgccttggagacaatgtgggtaaaaagcttactgatgaatggtaaaataaacagttaatccgtcgtaaaatatagcaacttaaaatcagaaaaaacgtattctagtttgcgaatatagatatttctcttattcagattcgtcctactaagataagatatgcttcattcgattatagattgctatattttataaactacaccccgcagcgcgggatatatagatgaatgtatgttatatattataaaaatgatagatttatatgtttaaataatgtgaagatggtgatttgacattgcttgcgtgttaagttttaaaaatacaactaaattacaaatgatatatcatatttgtatgagatctaaaatactctaaataatagtaattgctagtggatgatgatgtggcataccacacacttgtatgttgagttttaggagttagtgggtaccaattatatagaaagtatagatactgctgttatgagtgttcataacaagtattttccttgatgatgttcatagaaattcttttatttcggttgttctgtttgcagaaggaagattttgattgttgttgctgccacgatgttgatcctagctgttcttgggctcggtgagaaaacaagttcctttcctctttgaagaattgaaattgcaaaaacattttgtaattaatctgtttgtgcgacttatttggttctgcatctttttttctcagcgttctcaatatgcggaatggagtcactcgtctatgtgtaagcatgaaaacactcctttagagttttatgatttcactaattcatttgacatgctgaaattacaaaaaattaaaaagaattgccctagttggcataagattcccaaatattcatctgttactggtgttgagccacacggttgttttggatgcaggttggtgtttcttgggtggattctggttgcagcaacgcttttgctctgtggcaccttccttctgctacacaagtaaggctacgatctttttagtcactccacaaattatttgctccatgtctagaaaaaactattttttatttgcttcacgtctcaaaaaatgatacatatgttccaaaatataaggatgcaggtagaattgaacaagagaaagttaccactggacatggatattaagaaaaaaataagtgatattaaattggagaaaaataataattggttaagaagagaaagtgggtagtcaatttgaatgagggaagattatgattgattaagaatgaaatgtaggtgtagaagttgttatattgtgggataaattttttgagggctgctacaaaacagggtcctgttgcaacggaatagacatattaactattctcttgcacgagtatcacaggtattaggttctaggtatcataggtaccgggtaacaagtatcacaggtatcgggtaccatacagctagtaccactacaagtatcaggtatcaggtattgtctcatagaagggtatcccgtcgagattttctgtaaatttttttagacaaaatattcctagacaaattttaaatgatatacaagtcatattttgtgatggggtatatgttttgtttaaaaactttcttctacattttcaccgttgcttgctgccatggcgacctcacgtacctgctgtctcgacactgagcaaaagaattccttgacgtttcagcgtggtgggtgacacctgcgccgccatgggcgagtgggtgcagcgcccgcaggcgcgcacggcgctcgacgacatcctcccctgcgtcgacacggcggcggccgcggacgcgctggcgcggagcaaggacgtgacgcaccacctcgtcaccgtcctcaacggcgtcatcgccaacgtctccaacgccgccgccgccggcctcccgccgccgctctactacaaccagtccggcccgccggtgccgctgctgtgcagccccggcgaacgctgcgaccccggcgaggtcgacctcgccgccgcgccgcgcgcgtggcgcgaacgcgtgtgccgcaccacccgcgccgcggcggcggcgccggaggtgtgcgccaccgtcgggcgcctcacgccggcgatgtacgcgcagatggtggcggcggcgagcgcgtgcgacgcgctgtcgcggtacgggccggtgctcgccgacatggcggactgcgcgttcgtccggcgcgcgttccgggtggtcggcgacgagcactgcccggggctcggcaggcacagcgcggaggtgtaccggggcttgctcgccgtcgccgtcgccgcgctggcgtcggtggtgctgtgggtggcgcactcgagggagaggcggcggcggcgcgacgccgtggagctcagggcggcggcgtcgccgtacacggtgcatcactctcatttggaggaaggagcgctcttgaagagccccagaatgatgtacagatagaaacttacttttgctctcttttttagaacacaaaacacttttgcttttctgctaactggaatatttgaaatgtctcgccgctcgccggccaaagtatattaagagtttagaaagaatgtcttacctccctttaaaatatacgacaccgttgacttttcacataacttgttcatttgtttcattcaaaatttaatataaatatgtaaaagtataggttaagattatattttgtttgatcataaaataagtcacaacaaaataaatgaaatatatgtttttaaaataagatgaaagatcaaacgatatatgaaatattaacaagtcatgcattttaaaatgaaggaaatataaaagcggacgctgcgatgctcttccgcaatacgtcaatgcactgctgttacaaccacatttttacaaggctacttaggctgtgttcgctagaacaagtttctatcttaaagagtgatcacggaaaacggagcggtccattagcgtgtgattaattaagtatttgcttcttttaaaaaaggattaattttattttttaagaaactttcatttagaaactttttgcaaaaaacacactgtttagcagtttgaaaagcgtgcgcgcgaaaaatgagagagatgggttgagaaaaggggcattgcagccagttcccaaaaggaacggtacgcacggaaaacgaaacggtctattagcgcgtgattaattaagtattagctaatttgtttttcaaaaatagatcaatatgattttttaaacaactttcgtataaaaactttttataaaaaaagcacatcgtttagccgtttgaaaagcgtgcgcacgaaaaacgaaaggggagagttgggaaaacaggatgccgaacacaccctaagaccaagtttaatagtatagctaactagcagcttcaattcgtctatagtcaatctaatagctcattcatataatagttacctataaacatatactataccattaatatatggtcctacctctcatacatacaacgtattggagtccgtgctctctctctcttctcttctcttttccacatgtgcttacagctaacttgtagcatgctattgtacccactctaaaactttagagaactagttaactgcactccgaccaccactatcgggctaagagcaagtttaatagtatagccaactactagctccaattcatctatagccaatctaatagctcattcatacaatagttatatactacactattaatacctggtcccacctatcatacgcactgtgttttgtagtccgtgctacagctgtctacaaatttatagcccgctgcttttctctcttcttatttatcttcttaaaatatgtttgtagcccgctgttcttctctctccttatttatcttcttaaaatatgtttgcagctggtttatagcatgctattgtacctgctcttcaatgcatgccgtcctccatgttggttttccattcgtctcctatgaccacccaaagttgttatatcgtggaggctttttcatcaaacacccttttgtgtttcttccagacaaaccaagtcactgggatcaccccgacgtcgaatgtcttgtgatccattttggcgactgatcgactaccaggatcacggagaatgtgtttcgcctctttttaagctgtgtgggtgtggtgtgtctcttctatatgtaatttaaaaaaaacacaagaaaacataccggagtgcaaggaacacaaagacaaatcatacaatcttcaagatagcaaacggtgctttacaccgcgattatatttgtcctcactggaatcgacatcttatcctttcatccagataaacgtaaagtacgcccctttttgtaggatctctctccaattcagttagcctttttctgcctccaaacgaggaggcagttgtgctcaacaccaacaaacattttgcgtcccaaagcgaacacattctcaaccttttatatggacacacgaactgatcacattaattcacattcacttcgattagtagcaaaattaatcactcgcctcgcttgccactgcggttggctggaagtgtcaccctgcacccacccatggccgccgccgtgaactcctcgtcgtcgtcgtcgtcttcttcttctccggccaagaacgccggcgcgcccgcggcggtggccaagtactgcctgtgcgcgccgacgacgcacccgggctcgttccggtgcaggctgcaccggtcaccggcggcgacggcgaaggcgaaggcggcgatcgtgccgccgccggcgacggaggaggaggaggaggaggagggcgaagaaatggcggcggcgcgcgcgttcctggcgcgggcgtcgcggaagtcgaggcaggatggtggtaggaataggatcaagtgctttcatcctaggacttctagattaggaatcatcgaggagtgaagagtgctctcttttttttttttgtttctttgattgtttttgttgttgatatgattgagtttgggtcatccttgtgttgttgcacatggaccattgttcagagtttcagacgaatatggccgtgagcgtgaccaggtgactaataaagtttgttcttcgagtgaaagatatatttgagtctgtgaattcttttcaaggtggttaaatggacatttgaagagtataaaaataacaactctattaaacatgctttaatagcgagagtaatttagtattccctccgtcccattataagtgtagccataagtttccgtgctcaacatttgaccattcgtcttatctaaaaagttaagtcacgcataacaatttccttctttatataaggaatttttttaaggttaagaatttgcaatataaataattttagagtaaatatttttttaattcacccggccactatttatcattgttagtcatcttctctgctacctccactccattcctaaacaagcatgtaggagtatctaaataggtagttctagaggttcgctataactctttaagggcccctttgaatcgcaggattgagaaaacgtaggaataggaaaaatataggattttgataggaatataagtgtaaaacagatgattgcaaaacgcaggaaaaacacaggaatgatcgtttgattgaactactggaaaaacacaggaattgaatgagagatatagactcaaaggaaatttagcaagaggttgaagctcttgctaaatttcctccaaaatctctataggattgtccattccataggaatgattagataggattcaatcctttgtttcaaagggcttcatagggaaaaaatttcctataggattgaaatcctctaaaattcctatgttttcctccaaatcaaaggagccctaatagtacatctttttctcatttttaatcatagaatcaacagtgcttcctccttaaatcattgaatcaataatactccccccttgctttcttttcttctcgatttctctctatattaatggtcatattattcttagtatgtcactggctaactaaagctatacttatttagggataataagaaaactatacttatttagggcattaaaatagtttctccttaaccttaaactctgctatacaacctactcccttaaccttaaactgtgaccagaaaatcagagctccgaatccttgtgggaaaactttttcattctattttgaacaggcctgcttagctgattgtatatgttacagcaaggctcgtgaagttattttaattacgtaattgccccatttacaaagacttgccaagttgccttttactccctccgtttcaaaatatttgacaccattgactttttagcacatgtttgaccgttcatcttattcaaaaaatattgtgaaatatgttaaactatatgtgtacatgaaagtatatttaacaatgaatcaaatgatatgaaaagaataaataattacttaaaatttttgaataaaacgaatggtcaaacacgtacttaaaaaaatcaacggtgtcaaatattttgaaacggagggagtatattacaaagagagggaggggaaggacactaacgaaaatagccggtgctatttcctagttaaccacacaactacaattacattaaccacatatttctttgaataaaattccaaattcaaagaagggatctactcacgggaaatcttcaatctacagaagcaacaagagaaatcatatatcatagccgaaatatatttatgtgggatagaatgcaagagtgcaaaaactagttttctagcttggacgacagacttcggtcagaatataccttgataaaaggatgaacaagcttcactgtttcctgtagtaaacggaaggtgtgatagtgtgaaacacactcttcagataatcaaacattcagaataagattcagataaacagaaaaaggacatggcaataccttgccacgtagataacgaaagacatgccacgtacgttgtaggcctcctcacagattacttcctgcaaaaccataacaatatgtatgatcaatggataactaatattcgcatgtttaagacgtttaaaattctgcgagcaaggtgaaaagctgagatggtgagacaaccggagatccgtacaatatttatccacggtataccaactaatataacttctaaaaacatataaaatagtaaatccttcttaaatatgtactgtttatcaggcaaatctcacattttattacatgtatataaaaaattggatacataacttcaaatttaaactgcagatgtaacatatcccacacgcatgcaaaaggcaagcaggaaatgtcatgtaaaaagtatgttgattcaaactaaccacattgggttgtgcctgtgccttcgaggtaagaggggaaccaagtgcatctctaatatattgatcctgcaaccaacaccaccatatatgcatatcatggagcaaaccatgaaagcgcatataattagcttaagtaactagctaacctgcgattgcaaaatcttttcgagagagctatcactgctatcctgtgaactgtagtaaacatcaactgggtcggtcagtctcagctgagcagtctttttcaacttctgaattttgttcacaacctggtaaaaatgttcataatcattagactacagtaatcagaaattgaacaagatataatggaagagacaaagcgatgaaaactttaaatgtaattaaataacgcaaaacccagaccatgtgtagaaaaattacatttgcaggtaatatttgcagatcatgtgtaataccacattatcatggcaatagctaggagaagttagaaatttgggcatgatcatctagaggcatgatatttattcataaatcttcagaaataattaaatattgatatttcacatagaaaaactatacttttgactgggaaccaaacttgggcctggcatttcaaagccggacttttccagccttggtccaaagcactactcggcttggtatgaacaaggaaacatccaaatagtatttgacattataactaaaaagaaattcatctacaatatggaacattatatatactccaaatgataagacataatttttgaatcacctcacgaacaactccagcttcaaacaatgattgatcaacttggagatccaagataaccaaaacatcgcctacaacaatatcaagtgaggtaagaaaaggttccataaatgctgaaactatgtgaagatgtttgcaaggtaccatctcctgcagcatcaatttccttctctgacacatttgcggggcgcttgaattctcgaaaaacctaagaacgaaattgaaggaacggataaatattattctatattaatatcagtcacaaatatccatgaagtcaaagatcacttaattaagggagaaagatttcctctagcaacaatgttcaggcataatcccttaacactgacatttgtttgaatgaaaacagaacaagtcagtgggatcaaaataaacacttgggtacatttttaccataataaggaatactattaccttaatatcttccaacgtcaagagatgactgccaaaaaatatttcgccactttcctcaaatgttaggatctgatcctgagtcatcttcttcacctcatttgatattttgcccatgtcttttcctaatcttttgcctaacacactacagaaacacaaataatattagaaaacagctacaaatgtgaaaggaagtcttcaagcacattcaaataggcattaattacctgaagttaggttcagcacgtaaagatgaatacactaagggatcgctacaagcagtgaccatcttgacattcatctcctccttgacatactacaaagcagaaaatggaatcaatatataaacacataatgcttaccataattaggaataactcaaatattgaacaataaatatgatcatagtcgccaaatgatgagaatgaaaaatgaaaacatgcagaatattgaaaatctatgtgatggagaaaagaaggcagaatattctgaagtgatcagctgatcgcagatataattttgcataaatttagaacgggatgctgggagttttttaatagataatcttagtttcgctgtaaacctctttcagctttccagttatgtcttcaagaaaatcattgtcaggatgcacaactaccatctccctggaaagtcaagaaagttactcagttaaatatatttaaagagcttatacatgagctagataggccttgggaaacaagaaataataagcaatcatttttagatatgtcgattgattcaagtcaccgagtgacaaacataaaaagaaaaaaaatgaaggaactgttcatgatgcagatttatcttttgtttctaggtctgttggtcaattctatatgtataaaatcaattcaccataaaacaagaaattgtgtaaatagtatagttgtataatgagcatgccttaatggtgttttcaaaggtctgttatgccgctcccgaatatttcgagcaagatcaacgatggtcatcatcctgttgacactgtgctcaacacgctcatctatctgatcatagagccaaataagttgcacactgtatacaattttctgacttctggtagaacagcatataaccaagaggagtattaaactgattaaaaaaagtacctgcccagttgaggaagggaaattgcagaaatgaatgctcttttctgatttgctggacacctttcttaagttctggtacagaacttcagtgaagaagggagtaaacggagccatcacaacacaagttgttacaagcgcctaaattaatcatcaaaatatcttagataagtacaagaaattttatttctacatactaggcataatctggaaggaaccacataagtgaaatacatgccatgggaacaaacttctgattcctaggcagcttatcttgttgaattcaagcaaaaatagtagccttttttttacaagtaaacagcactacaacaggactaaaggagtctcctattgtgctatattaacaaaaaggagtagcttaatgaaatatatagtcatatagaagaacatgagaaaatggattagaaacggtgcaagataattccatgacatgaaggaatgagaatcaagaaaacaaaaacacaaagttaaccatttaaggagataatcattgaaacattaaccaccatcttatcccaaaaatatatcctgttgtgacttgcattttttcctgttcagctgaagttgtcaaaagcagaaaatcactgaaagtctgcgtacatggtaaagtgttgaaagagaaatcctgcagtcatcttctccagtacgacctttcagacgcttgcgattgaaacgcacatatatgttggtaaggttgtcaatgtactttactaaataagggacaacctgttgagaacgtaagataatgaattatcattatatatcaagcacaacataaatatgaaaagaaacagaagttgagaacaaatatcaatcaaagatgaccaaccgtgtaaagcctatatgcatccatctcctgtcgaacaaaactaactagactttcagtagcggactgtatccagtgatctagcacattagatgacctcagaagaatagcttgattgattggtgaaaatacagcaagaccctcaacttcaagcctcttagcattttgaacaagaaatctataagcattataccatgggaggaagacatctttcacctggttgagtcaaagaatgttaagtatttttctcaaaaactatcataattcataactggagaagtataaccaatatgtggatcagtagcctgaccatatgaatatagctatgaatgaaacatataaaattacataaatgcaaggaacaaagaaacttaccacaccatggacaccatttttgttgaatcgtagggactccgcacggacgacaggagaatttattacatatagcctcagggcatcctggaaaagaaaaggatgttgaacgtatgaatcgcagctcagaagttataaaattaatcatatgtataatcaagataaaaaaaatctagacgcagcataaatcagtaaaatgataagcagcataagccaatatcactgacttcaactagaacataccgctccataattatcaatgacttccatgggtgaagggtaattatttttacttttgctcattttcttgccatcctcagccaagaccagaccgttgcatataagatttttaaatgcaggtttcccaaacaaagctgtggacaggaccatgagagtatagaacctgcaagatccaaaattttatatgttgaataggtccttcgacacatttgtaaacaggtaagcacatctggacaaggttttcttattaaattgcattaacgattaaaattttatatgcacaaaatactatcaagttttatgatcatgaatctacagaaagaacgaactccgaaaaaaggtacaatgttgagccatcaagggaaattaaaaaagaacagctgttaaataaaagatcaggagataaaacagaccatccacgagtttggtccaacccttcggctatgaaatctccgggaaaattcttttcaaacagttcgcgattctcaaatgggtaatgaatgtaggcatatggcatggatccactctcaaaccagcaatcaaaaacctgaatggtgagcacaagatactttctcaatttataacagtcatcagtgaagacaagacagggtatacacatgatatccaacatcactgctttaacttgtatgaaattgacataaatcatttcacaacacctagatttgcatataattcaaggagtaatcaagctgaattcatcaaatttagtatgcaccatgcttccaattgggctagcttatttcaataccctatattgcaggctacaacttctactatagactcccgatagcattaaaatttatgccactaaaacacacggcaatagctatttatccgttcaggcattaagcaaatctagactcataatgtaagtcctgcaatatgctgaattatcaatataacttggatgaatgatttctctttaaattatgtacattaatactcaaaactgaaaagtgcatgaaaaacaaaaggggaaaaaagatgaacatgaattggccacgctacagttcatatgccttcctagtaatttaagatattactaataatttaagatattacactatctcaatgaacttctatgatgttataaatagaataatcaatctaaacttttctaaacttagacataatattttacagatgcattttataattgttgatcaagattaggtaaaagcattctacaaacatgaatttgcaataagatgtggaactatgtacctacagttattttcatacaatatgaacactactctactctttgcatatgctatgttagaaaattatttttaggtagagtgtcccctaataatccaaatcaaaaaagtacatcttaaacaagaacagagaaataatttttttctctgtttgggacatgaatcaagactcaaggaaattgagaggtacaaggtgatgtaaaattatgagttgcgatcaacttacctcatcaacgcgtttcaacgccccaaactcttcccctctctgagagggaactgtgatgccatctatatggtgtcggtgaagatcactaatctggtaaagatttttagaggatttatattagaacaggtttgtgtcaagtgctatgtaaattttggaactcaagaaatatgaaaaaaaaatagtactactctcaaattaaaattatagtggaccggcgttagttgaccagcaaaggggaaaaaactctcataacaaagataattaaccttgacaccagacaacttttcgagtttatcaacagagtccataacaattatttcttctccgtcttgactgatccatagaggaagaggagtgccccagaatctagttcggctaacagcccagtctctagccccttcaagccagttatggaatctcttttcctgcattatgaattgtcaagaaccacaaatctaggtaaaagaaacacaaaatcaatttgcaacaatttattaaaaatcttaagtggtttcctagttactacaaactaaatctctcacaagagcttctcggaagtaacaagaaacatttcagcataaacaccggcaagaaaccacatggaaagtcttaaacgtgcaatctgaaaacgcatgacaaaaagtcacgtgcaaactctgatatgagaaatgatttggttgcacatatgcatgaatgaagtagcagtagagcgtccatccatacataatatgttagcacaaccaatgtcctgtacctacaaatttagtactacagaattacaccatgaaagcatcagaatagaaatcaaccaagtatcagcaaagagcaaaactaaacacacctttgaaaatgagcattgaagtactgaacttcatggtttgcatcaggggaaaacagcattagcttttttatgttggttctaaaaatatttatcagtccaatctaacttgccaaaaagatggaacattttacatttaaatttgagtaatcagggcccagcacccaaaaaaataaaaattctggctaaaaggccaaatttgagttttaaaaatgttttggatgaaattttctactaattgattgtcattggaaatatcagtgaaggagcaagtggttttgaaaattgtctctgtatccaagaaagagccaagttaagaattaaggacaaacaactcgttcaacaagcatgctaagctaggaacaatatttgattttagctctttcagaatttacaatataagatttcctgctacgtgtcttccacccttttttctgggctggaaaataactgcctgccaatgtttataaggttgaaaggagtcacacagattacatgagagaaaggctagcatcaaaggtggtagcccactcgagtagcacaacacttgactacagggttttcctttggtcacatttatataacaaagatgttaacaatacaaataatgaaagccaatattaaaacacaaagttcagcataccttaacgtaatcaggcacccagtatgtctccttattacattccagcaactgatctctaatcctttcaactctgatgaacctacactacaacaaagatctttaggctacattcctctgagttacatcaaaaggtataaacaaaaggtaagagaagtaacccaaatgtgaaaaaaaatggaaatgtattttctatcagtatatttcaattcaaagccctatattcaatttttcaatcaaattaaaaaccttcagataagcattcggcgtttttttaagaataaacatgccaaaaaaaaacttttattggagcaggaatatcagagtactacagctcaatttaaagccagcagaagaatgtgctagtatatggtccaaatttacaccagcagaaaatacctaccagcttggaactgcccgatatatgagaggtgtattagatctccaacagtatggatacttatgtataacgcttccgtgactaacaagtcttccttttttctgaatattacatgtagcatacaatttcagcatacaaaacatcaagtaaaaaaacgcatgatttttttctgaacaagctgaatgcaaatttactgcttacagttagcataagttaccggcaactgaacatttgaaaacacttacctttacagcattgattacatatttgttggtttctttgtctgtgacaagtagaccattaaattcggagatcttgtctttgaagaaaccatcatcatcaacagcaacaacaagatcggtaccctgcatttgaaagaaacaatcagttaagtgagttttactagcacatacagtagctaatgatttaaaaccatggtgattattgttgggtacaacaatgaaaacctgaattaggagccatccttttgttcacagagtagttaaaatccattttgatacttcaggttaaagagtacaagtgcaaattttgaaatcaaataacccatgctaaccaaattagtaacatgatacaataaggtatttcattatgcaccatataaagaagaatacgcacagtagagattttgctctctaggatgctaattcgtgttgcaagagtgtaaacctaatttctttcatgtttgattggttttccaattgttggcttcggccttcaagcatctgatctttgtaggcgaacctttctaacctgctgatatgcaaaaccttttgcatatttcccaaaaagaaaaggaaagaaaaagaatgcagcagggcaacaatgtcaatacacaacataaaacaaaaaggcactaaagttaaagatactcaactcaaggtggactcagtcacagaccatatccttgcaacccatagtagtaatgtagatggttcacacgcacatgcacacacctccccacccacccacacatccctcccccagaattcaccaacacccccttttgccaaagttcactaacatcaacaaacaaatattccaagatgagcagcacacacacacacacacacacacacacacatatatatatatatagagtaaaaaaacctttcaattcgaaccttaactgctgattagattgttacttttcaccctctgccaatatttctgctaaaaccttgtgcatggtcagcaagatcacatgaacctatcattgtaagagtcatttgaaaaaaaaaagtattgtagggcccatatttatcactttttactacagcaaatagataatgcttatgcatttcataatttaatgtgaaggctatccctatgcctttcaagtttatgctcttttttttataaaaaaaaacaaaggcagaaactgcttcatttcattgataaagaagagatacacatcgacccaagaaagggttcccactgaaaacaccatcctacaagcacctcaagatcattacccaaagctacactagacacctgaaataccaaagcagccaaaacatctataatacattctccaaagctacactaaacacctgcaaacaccaaagcagccaaaacatctataatacattccccaaagctacactaaacacctgcaaacaccaaagcacccaaaacacctaaaacacccaacacctaaacaagtcacaccaaagcacccaaaacacctaaaacacctaaacaagtcacgcatctgaccaaactaatatgaatctaggttaaggtcctggaacacgagccacgttgtgtagcccaaataagattacagcaagctgaacatagtgtcccgggtatgcctcttttaggaacgcaatgcacctatccatagtgtcttcatccacctcctcatcctttgtgataatgcctagcttcttcatgagtacatatgttttcatttggtcaatgaggagtcgccttttcttcatgtttgaaggtagagggacacttcttcgagaggtggcagtgataatcttttgccgcactcttttggccaacctattcttcaccgctggagcttttgtgatctcaagtagctctgctttatctgtcaccaggttgcttggtgcaacctcaagaggaagatgctcacacctagatggagggtccatagttggagtaacatgctcttcctttggtgcagctatcttgctagataccccatgtccttcattgagagatgaaggaacactcccatgggatgttgaaacagtcaatgcgacggctgtgttaggtgcgctcggagaaaggggcgatacaactgaaggaaggggcgctgctgtaagcttctccaaatctccctcgggtggagaagagggcacttcctgaccatctggcaaatggcaccccaaaaccaccttattggggacaccaacattgtcatttgtcatctttggaagaacctccacccgggactcggcaccaacattgtcatttgtcatctttggaagaatctccacccggaactcggcaggtgggatacaaagcttctcgctaatagcttgagaaatcaaagctgtagaaatcgcgtcggcattgaacgtgatcaacatcgactggtatccccctgcactctgtgaagagtaggcaacagggacagccctctgtgaagctgaggagaagtggcctgaagaagggcaccaccgagcgaaatggccttatccccaacaacaaaggcaacggggaggatgagtgcaagccgcgacacggtgatcagctgccagacaattgaagcacttccctcgcagctttgacaaggagcgtggtggattcccggtggcaaccggtcgagcacgctgcgggcggggaggaacaaccggacacgttgctacccgatgaccaacctcgcggcagttgaagcacttgtccgaaagaaaacccctacccggatcaaggatattgctcccgaggcatggcggaacacatctgaaggctgccatcgttcctgtgaatctttgatgagccgccactggactgggcaggtgaaggtgaagtttatagaggaaagctcacatcgcgagcagggcaggtggtggatggcgggggatgcggcgtggcgcggtggtcagtggtcacctgctccggatggtggtcgtcaaagccgggatggcggctggtggcggcgggggatgcgttctggatctgcgggggtggagcggcggcgtggtggaggtggggggaagaagggtggcacggtggtcaccggccggctccgagatgggaggtcgtcggcgcctggatggcggcggcggggtgaggactggatgtatcgtatctttgtcctccggtcacccgaccagacgaccaccagtgttctctctcatcatgtaacccttaaaaaaagacttgctggtttagttcccaactttttcttcaaacttccaacttttctatcacattaaaatttttctacacacaaattttcaacttttccgtcatatcgtttcaatttcaattaaactttcaattttaacgtgaactaaacacttctttctcggtgaagccctctaggccatatggcaaactgggccacccgacacgacccgacccaggcccaagaagagtcgggccgtgccagcccgacatacacgccgaccggggcaggccgccaatgtactgcaccaatagcttaggcacggcctaataagactcgggccggaccgaaggcacgaaagccaccatgctcctccttggaaaaagtctattttcctccctcatctatttgggccgtctcctaaatggctggagtaagtctattttgaatcactcgtctctttgggccatgccttatagagctagaataagcctattttggctccctcgtctgttttgcctccttgatcgttggaccaagccataccgagccggcctgcccatcgtgtcgaggtaaaggccaaggcacgggcctgacaccagtcggaccatgtcatgcttgggctaggccaaaaccccatgacatggaccgggccgtcagccctgggccttttagccaactaggccctgtgccgaagtccaaacaaaaactacacgaccatatgaaatttccatgaattttttttatttataattttttttattaaaagttttacaaaaataatttttcattttgaaaattgacggaagtagtcccctaccgccctctgggaaaaatcgccctctcagagggcggcgaaaatgacgtggcagacggccgttcgctctcgggcgacggccgtcaacgaaatttgcaggcggcccccttaccgccctccgctagggcgattttatactgtgcggggggccgcctgcaaatgggcggcgagggggggcatggaattttgcaggcggcccccttgccgccctccgctagggcgattttgtactgtggggggggccgcctgcaaatgggcggcgagggggggcatggaattttgcaggcggcccccttgccgccctgggggagggcgatttttgcctcccccctataaagcccagtccctcctctgtgaaatttcattatattcactaaaaatccaaaaaaaacgaaagagagagaggggagggcagcagaaggggagcggcgaagccctgctggttcgctcaattcatcacaggtatgctcccatacatcttttgcatttgtactaatatgttatgtttgagtatatatgttgcgttttagttttagttccatatattttagcacatctgtagcacacaacacatatgtgtagatccagagcatagaatataatagtatgaattgagacatagatagtagtgttaattgtaagatgtagtttagtttgatctggagaatgtaacgtaattttagaaatttagagaacaatattgtagagaatgtaacttagggcgtagtacagaaatgcgaggttaacgcagttattgttttcatcaggcacaatgtcaagtaaggtcacatttcagatagttcacggtgaaggaaatattagatttggtccagatggtgttgatctgtcagattttgtaatgacatctaagggcatcgataggcctgcggagagaacatttcagtcaatttatagttggttgttgagaggatttagaatagaccaagaagtctacacaatgtcagtgtcagttgtagtgagtcgtgcaacagaaggttatttttgggaactaatgccgatggacagcactgatgcttggagacggtatgtggaaatggcttttgaacggtcatggcccctcgttatatttgtgtcagtacaagagaaagatataaatgtttcaatgcaaaccgaagatgtagagggtcctatcaatgcaggggatgttgttggaccatcgatgcaaaatgaggaaaatcaaccaagggaggagcaggctatgggcatggcggatgagggggagagagtcggtataattgttgatgaaatggagagggaagattcggataatgaggaagcggacgacgacgcatcatccgatgaggaaggtgatgtaatggccactgattgggcaaatgaggacttctctggacttgttatatcagagggtgatcatgtaccctgggagtataaggagaacgaggtaattgagggtgcaagaaccaagagaagaaatttaatgagttgtgggacaagttggatgagttgacaacgaagcaaacagatgagcaatctcgcagaccactagttgaaggtgacgagcctcccatacctcttggtgcattacatgatgacccaccaacaatgagaaggaggtcagggtcgtccatcagaaatttcactcagtggattgagaatgagcctaaggagaagtggtctctattgttcgacaccgatggatctcggtatggcataatgacaaccaatttggcagaggtgtacaactgggtaatgcgaggagttcgggtacttccattggttgctattgttgaattcatccttcacggcacgcaagcgtactttagggatcgatacaagaaaattggtccgtccatggctgataacaacatagtgtttggcaacgtagtgacaaagtacatggaagataaaatcaaaaaggcacggagacatcgagttgttgctcaaggcacacaagtgcatcggtatgaaataatgtgtgttgataggagcaggcgtgatatctatcgcaagcaagccgtgcaggaatgtgtcttgaaggcggatggtggatgtacctgcagttgtatgaagccgaagcttcatcaccttccttgctcacacgttcttgctgctgccggtgattgtggcatatctcccaatgtgtacgtctcaaattattttaggaaagaagcaatctttcatacatggagtgaggagatatatgggttcgggatctcaggatcttacacaacgctgagtgcccaagttttttatattccagatccatctaagttaagggtgaaaaagggtcgacgccaaactagacgcatcagaaatgatatggatgagtcagaagcaggtgggaggactttacgctgcagcaagtgtgatctgcgcggccatacttacaagaaatgcccgaagaatgcagaagttccaagcggcgcagatgctagtccatctggacaggcaagtgatggtaggtgaccacctggtgatgagtgttcggactaaacacttttgtttgtttgtactcttgtttagtatgtgttagtaattcgcttatgaacatttattacttatgttgaactaattatttatatgtttctgatcaacctatttgatgcaggtatggcgtacgacacaccggcgctgttgaaccgtgggattgacaggaaccaccgctcgttcctgtcagcagtcgagggtgcacagctcggcaccttccgtccacgcacgtcgcgcgagtggttgcgtgtcgacccccgtcacgttccttggtacgcgtatgttcacatttcaactcaactttgctttgtgtcgtacttatgtttgaagtttgctctatacaggttgcgtgcggcaggtcttctaccactttgtaggcttgttgaggcggcggcggacgaccgtgacccagcgaagcggtgggatgcagaccggtcactccttgccgctcttgtagaccgctggagacctgagacgcacacgttccaccttccctgtggggagatggctccgacactgcaggacgtgtcgtacctgctcgggctaccgctggcgggagcaccagttggtcccgtggacggtgtttttgggtggaaggaggatatcactgcgcgcttcgagcaggtgatgcgccttccacacctaggaccggccaacacccttcctccgtactctacagtcgggcctagcaaggcttggttgctccagttcactgtaagtaaataagttgttattatcatacatgcttatttgcgaccggatgagtgttttgtactaaaatttcattcttaattgtaggcggaccttctgcaccctgaccctgatgattactcggtccgacgctcccttgaggcgtacctgttgtggttgttcgggtgggtgatgttcactagcacccacgggcacgctgtggacttccggctggtccactacgcacggtccatcgcggatgctcagccacaggacgtgccgcagtggagcaggggttctgccgtgctagcagccacgtaccgtgccctctgtgaggcgtgcacgaagactgacgcgggagcgatcatcgctggctgccctatgttgcttcagctttgggcagccgagaggtttgccataggtcgaccagtggtggacagcgcaccctacggggttggtcgcagcgcgcagtggccagaggacggtcccacgatggggacttactggtgtcgacgtggggttagtgcaacttcgctgcgttataagtttatcagtcgtcttctttttttttcttcacataacatgtctaattccgatcatgtttattgcagcgtcgttacgctcacgtccaggtgagacgtggttacccggacttcgtgttcgagtttgaccgtctccagccgagcgacgtcatctgggagccgtacacagaagaggccgtcgctgcgagagcaccgctaggactttcgtccttgtgcacacgcgaccaggcttactggctcaccatcctgccgatggtgttcgacattttcgttgagcctcactgcccgcagcgtgtgatgagacagttcggacttaggcaggtgtttccgggcaacgtgcagccgaccgtcctccctgccgaccactcgtgagttcggattgttcatttctaaatttttatgataattacttcatcgagccatataatttacctctcttcacaggttgactcgacggggacagctagcaggcgcactttgggctccacgtgtacagcagtacgttgacgactgggtgttagctacagaggaggtgatcaacgagctcttcccacacacggaggagaactatcgtgactaccttcgctggtaccttcctcgcactcgtgcgcgtgtgaccttcactccagacgccctagagccgcacgttgccgctgtcacggacgcgtatcccacgcaccgtgaccgagactacttcgtggcggtacgtccaatttgtattacttcttacaattatttcatttatcttgcataatataggacaactactgaattttttatttccatcttgcataggctgatgccgcacgggatatcagtgccgatatcaccgcagtccaagtgaggttgaacagaggtttgcacttgactgacgttgagcagagggtgaccttcgaccggatgcaggagaagatgcgtgcggtcatgcacgtcttctcctgtcgcagcgccgtggacgtcgtacctccagctggtccggtacaaccacggcctcgcgcgcctaccgtcggagcaggacctcgacctacagcacctgtttcgcacggtactgctcagcccagaggtttcttaagttttgtttctgtttttctacgaaaacatcaccccgtcgtaacttgatgttccatcctcgcaggacctcgtttgccttcgagtgcccctagcttcggagcagtgcgacctacagcaccggtttcgcacggtacagttcagcccagatattagttcatttttgtttcagcttttgcacgaatatgtcaccatgttttaactgcacgtttcctcatcgcaggacctcgtctgccttcgagcgcgttcgcaggcacgaccggcgcttccgcgagctccgcaggggcgttcgccacctcttcgggcgcgttcgccagctcttcctctcacggagcgtcgatccctcgcccacacggtactttactttttattaccactgttaaatacttgtacgaaactgatggtccttgtccagcaggatttgcagccgggatcttcggtactggggcctcttcgtctcacgccggtaggactggtcctactagccagttctacgacgacgacttgcacggtgcacaccaccacgacgtactaggctcctctcagcttggaggagctccagaggcgcacactcaggagcagccagaggtcacacctgtacaggcaggacgggttggccgtgccgtacccccggaccgactcacgtactcccaggggcacattagggcgcagggtaggagggacaggggtaaaaggcctcgtcagtagtgttctacctcttcagtccttatgtgaccgtttcttttggcttacaaacttgtaaagcagtactacttttgctattactactgcagtactacttgtgtttgtctcgtctacatagttcttttcattcatatggtgctagaacaacttatgctcacgacaacacactttcggcgcttcacggtagtgtcagatccagtagcgcgcacagtccacaacagcacacatgaaaagcggcagctcgagttatcactatcaactttcggcgctgcctgttgacataaagtgattcacgcccacgcgtgatcgtcttgtcacatctaatgaataatgtatctcattgagttcacatatattgcagtgaaaacgacgctatataattgacaatctgaaggcaacctcttcatatcttctttcccactagcacaccacacacgaaaatggaagcctattcattggtaatacgtaatctagatttgagattatgtagaacattcttcactacaattttacattttggcagcaaaccaaatatgatcaaatgcaattttaccttaccaaatatttggtagtgccaaaacttgcttatattttggcactaacaaaatatttgtacggtaacaatccaaatatgccctaaaaaataataaaattgtattttaccagtcttggagattttaatcttgtatagttttcaatataaaaagatttgataactattgatatttataaaaaaatatagagcacagtataaaatcgccctcccccatttgcaggcggccccccgcacagtataaaatcgccctagcggagggcggcaagggggccgcctgcaaatttcgttgacggccgtcgcccgagagcgaacggccggctgccacgtcattttcgccgccctctgggagggcgatttttaaaaatcgccctcccagagggcggtaggcgactacttccgtcaattttcaaaatggaaaattatttttgtaaaacttttaataaaaaaatttataaataaaaaaaattcaatttccaatgggtactctgttactcttgttgattagagcaaacgttatcacattcattctacccgatcaaggtaaataaagtagtgcaaagtatcatagggcgaaaatcaatggaagtatcgtagaacaaaaatagcaaagcaaagtgactcttgagaacaaaatattcaagaagaagaaaaatgagctcgggacaaaattcaacatttgctaaattcaaggaaaataactattgaggtaaatctcagttttagccttcacagagagaaacgtccaaatatttttcccatctgcaattaagcttaggatagtgtgtaggagtaaaatgtatctatacttcgaattaagaagaataattcttacctcaactatccccgaagcaagacagacacgataatcatcttcaccaaaagcaggggcaaaatgtacaacaccagttccagtatcatcagctacacagttatctgctacgactctaaatgcggtgtcctgcagctctgagaaatagtcgaacaaaggagtatatctgtatcacaaaaggaaacaaaaaacatgagtgcttagaataaactgaagatcacaactgcaataatatattcagtaactaaaagaaagaataaaccaagattatgaagtctagaacattgtcaaccctcaaaaggaaatggacgcattagaatctcaaaaaacgatgaagatttccggataagaaacattggatggatttgaaatcccattggctctagtcacacgaatagcattgtaatatcagttcgtactaggtgattgcagatattaaaagtaaatttgaatgcgataccggatatattggaagaaagaatcataagatccaattaataacagcagtagcactgacctaaggcctaccaaggatgatccatgaatcttttcgagtagttcatacgattcagtatccagtccatttttagcagctccactgctcccctttgaaggccctggcttctttccagtaactttgaccgtgaccggcaattggtctagcctagtttctgcaacaatatatacgctcccatttgatttgtccttaacctgtttgtaccgtagtgcagctcttcagatagaagctaagaacagtataactatagaaatataaaatataatgctttatgactatttctttgtatgagatatcataaacttggatgagcctaaacctataacaagatcaagagacaatttttagtattcgaagctaaccaaataattttctcacggtaagattgtatgaaaattgcgatcatttcacagtaaacataaattaaaaaaacagagcaagtcacagtcagaaataaaacaagtgtaagttacaaagcaatcgaagtatcagctatatatatctgagataaaaaaaaatgcagtatgagtttacataagggtaatctgaagttgcagtgaaagcagaggcatattagctgcagatcagcagatctttgaaaattctagtaattgttttctgtcatgactctagaataggtaggcaattagtaaaagtacccagaagtggcaaatgaaacaattacaaaatgcatggcaagagtaaagccttggtcttgaattaattttgagttatgtgaattagtttaaaagtccagataaccccagctgttcaccagatgacaggaaaaaaattgcaaatgtccaccattttctatggtctgtctgctttaggtgtagttcaggactatttttcacgtacccaaaatcaccaacaaattactccatacatgcagactgtactattaacaaacacagcaataaaaatatttaaatacgctataaaccttggcataaacaaattttgcattgacagagtgctaggttgctaggtagcgtccagggtgttgttgtccatgcaacaagagctgcattgtccacatcaccaacaacagggaaggacaccatggctgtttcggccggaacaaactacaacatcatcaaaattaaacatcaggtcaactaacagagcaggtcaaacaagggcgtgcagaggagagaaaacaacaattgacctggcggtgctgtcctgcctcaaagttcgacaatggtgttttcatgccagtgctgtaaggcatcacctgtagaacagctccagagatttaaacagggaaataaatacacaaaaaggggaaggggggttgcacataatattattaactaaagataattccagcattaatgcatccgaagcatgtcaaattgaccaaaacccaaaccccatagtcccaaactctaattggaagaacggtctgtgctcgatactccttcctctcatcttctactcacttgttttatataaccacgcttgctaattcttttaaagaaaattataaaaatcatattaattgattttttaaatctttttaactaacatatttaattaatcatgttaatgagttgttccgttttacgaacgcagccttagcagtgagccagtaaccaacttgatcatatacatttctgtcggacagatttccaaagtcctagcggtagagccatctaataatcccaaaccatgatgagatcagaagaggggctaaaatcgatcataaagacctctagaatctaaattgtgcataaatgggaattaggcatgggggattaattagcgtacaatagtcccatataataatcctaaaccatgatgagatcagaagaggggctaaatcgatcataaagacctctagaatctaaattgtgcataaatgggaattaggcatagggattaattagcgattttcaaaaacctgacgtactgaccttaaaactcttgtagacaaggtccttgtcccacagctgcgcgaaaacccaccacacgctctccatgaacttgatgtccatggtcttgtacccgtcctcgaaatcgacccacctccccatgcgcgtgacgacggcctcccactcggcgacgtacctggtgacgacgccgcggcacgcgtcgttgtagctggcgacccccatctcgagcacctgggcgcgggtggcgatccgaagggcctcgtcgacggcgcgctcgacggggacgccgtggcagtcccagccgaagcggcgggcgacgtggcggccgcgcatggcgtggtggcgggcgacggcgtccttgatgctgcccgcgaggaggtggccgtagtgcgggaggcccgtggcgaaggggggcccgtcgtagaagacgaactcctcgccgcccgccgtgcggcggagctgctcgtggaaggcgtcgagctcctcccagaggcggaggacccgctcctcctccgccgggaaggagaagtccttcccctcgcacacctcgtccatcgcgcgcgcgtgagctgctcgaccaaatgcgtgaggcgaggggaggaggaggggttcgtggcgcgcaagttttgggatcgagaggcgaggcggggggtgggggtatttgtttcccgcggcgattcgtggcgctcaagtttgcgacgccggcggcacgcggttttttctattttagaatcgcggggaggtgcagtggacggagtcctgactcctggactcctggaggggtttatagttcactttattactggtttttcaaccttatcaagatttaaagccccatcaggtggtcaagtcaaaacaaaagctaaaatttaaattttcgagcttgatttagaaattgattttaagatattttcaatgtaatttcttcttggtgttggttttaagtcgctacgaacaaatatataaaagttttacctataaattaatttttattcctaataagttgttttggcttattagagaaaacaggcaaccgatgagacttttaatattaccaaaatttaataaggcaacaaaccaaacatatatacttgccaatgtcaccttattaaactttgccaattctaaaagttttcactcttaaaagtttatcaaattttaataaagctttaaactaaaagcatacaacgctgccaagatttggtaatgttaaaatataccaaaatttgacactaataaattttagaagggttaaaaatagctacaaagtgaataaaccctaaacattactaaaacctaaacattacgaaaactaagattaacatttgacagtactttcaataaaagaatcatttgatagtactaaaatttgatacagtcgattttgataatgtactgaacacaaagccgaagagaaggcaatgccctcgaacgatcggagccatttgatcttatgagttattatgacttgtattttggtcccctttgtttttctgaacgagttacgggcgctgagatcatgcactaagcaaacattccacataaattttgtatgagttccataagcaatagttcgattcaagtaaaaaatgtcctttttgtttcaaaaaaatgtattgttctattaaattttaaattttggccgcaatttcagagagacgcaactaaggccatgtttttttccagcttattcaccggtctgaaatagattatttgtttcacgcttaaaaaatatctttgctcaaaataaaaacctttattctacttacaccacttgattaaagttatttatttgctaagtttatttatccccatataatcaactcgataacacagttggacaatgtgactacaaatcacaatcatgatccatcatatcggatgctttttttttctttttggaactgaaagttaaagcattcgaaaacttcgaaattatccatacggtcatagctaagttacgtttgaaagacaagttgtgatcaagctgacaatgcaagtcctccaagactatactctaatgttgccaaaattaaaatggagagaaacaaacatttgccagcatttggtttcgctatataaatttacagttcttccaatatacagctgtacttgaaaacatcatagtatctggacagctaaccctcttgtacatacaaaatgttgagacattgtacaaagatgcacttttgcacaaaaaatattgctacgcctagacagacattcgctggtgttcctgagaggctaaggatgttcatgaagccttcataaaacttgcatctccttcatattctcaatttcagtagtcggttgattgggcctccaaatataccacaccctggcaatgtcgatgagaccagatccaagcgacaaatactgcaggaagaaatagccaaaagaaagctgtggttgtgcaataaacacctacaagttgaaatacgatctagctcgccttctccaaaagaatcacaagggcaaataagcactactctccgaatgaatggaaggaagtgaacgtgtgtagcggctagatgggttgttacgaccaaggcccaatcctagccccaagggggtcttgtcaggtctcttactgtgactgcaacattgtgatgaaccgtgcgagtgacgatgggattttgagttcccttgtggatcagcacaaccatggtctgtgccattagcatgaagtgacatgctctcgccattctgtgagactgcacttcttgtcatttgaatcattcccaattcctcatcaggttgtaatgtctgttctaccctctcaatatcctcattgtaccctttcagcaagaagtcagaacagtttttacgcaccccatggtcaaatggatttctgaatcggccacctgggcctctgagataactatacctcatggcatttgccatctcatttgttgttaaattcctggatatctgcaagggataagaagaaataaatgattgacaatgtaatttaaaaatagagcccaaatataagcagggaatgataattgcaaggactgagaaaaaaacatttgcagtatagctcaatgggacaaacagaagcccaatcattttctattataaacacaactagctcaatggcactcatacaaaattatctatttttacatatgattttacttaaaattttgttaaatagctatctcattgccttatcatctccgagtttctaattttgtagtttttaagtcacgccaatcgctaccccttactcctttgtcacccatttatttgtttgcttgatctactatgacttctactcatccttcttggaatctttaaaaattggacattgtagttttagagttcattgtctcattggctttcattttacaacttttagaagccctgtcaaacgccgctattgtactcctctacggcccgcccgctgcctcctcacttcatcattgggatttaaaaaacaaaacataattgtcgttggggttcattttttttactttctagaagtcccgccaaaccgtcagcggctccgccattatacttctctacgacccgcttgcagcctcccctctttattatcattgagattttaaaaaacgagcatgattaacattggggtttattttttactttctagaagtcccgctaaccgtcatggccatgctgcttaacggcctacccgtcgtccctcctcttaatcgtcattgggattctatttggggttttgtttatagtttttagatgtcccataaacagccaccaccctactcctttacgggcctgttgtttctcccctttttatcgccatttgttatcgttgtgttctagatggactatttctaaacaaacttccatattttccgtcctgatattttgttgtttataaattgtattactactgattttattttttattctggattttaattaatctcgtgttgtgttctagatagtctcttctttcgatagtctttattttttaatccgattttggttatttataaattgtattcctatctgaactcttattttttttttcctaatttcggaatttattttatttttatttcaaattttagttaatctcgtattgtgttctacatggactattctttcaatatttttttttattaccaatttcggttgtttgtaaattgtattcttacttgaactcttattttttatttttctaatttcgttatttatttttttattttttaaaaatttcgaactctagttgtgttctacatggactcttctttcaataattttttatttcacttatttctaaatgtatttctactcgaactcttcttttctttttctccgattaatgtgggaatttctagcatccacaatgaacgtggtagctcctttcaagtctgttttaagaatataatagataggaccaatgattgcatgaagaatcatgccacaagtagcaagagcgatctctaaaagtgtgtgtacatattaacagggccgttaacacattggatttgtgttgaagtcatatactagacaaaagaaatgcaggttggctggcagttcacacccaaatatattgacatagaaatgagtaaaacaaaaaatggaagcatggtgtcattaggtggattttgatcagagattgcaaatgtaaatgataagggaattatacatcagtgtgaatggaaatgaccaaatactgcttttgatgagtaatggttttcattgaataattcatccatgcactgccaaaagagcaatgcaacagcaagctaaaggcaagtatatatatgggttattaagttacaaagttacatatatgggttgtgtacatactgattcaatctgggtgtcagacctcaaatagtataatgacaggtaaaagggaggcaaataccaacttggttcatacctgtgatgcttgaactacagttagagttataacgccaaagaaaagaaagagatccatcacaacaaaagacaccacccaaggatggttagtggctgaataattaagccatccaccaaatgatgcaggagaatctgggtctcctactactcctgcaaaggaaaagggataaagattaagaaatcttccatactacaaactgtaaaggttttaaagaaagatgtgaacatacttatgacggccgtcacaccagtaataatcattgcagaaacttctaggatcaggaacataaaaaattcccatttgttcttctgcactcacaaataattgtaggttagaatcttagacaaaacaattctccataagtaatcaaaagggaatagcaaaacaaaaggcaaatcattgactagcggctgaacagttttatcttgtttttcgcctctgcttgggtgcagactgcagacatcaggtttctattcatgaattgccaattggctgaaacaggcaacttcctaattctgaattaagatatttgactacaaataagaaaactcaacaaagaagagggtgaatttagtacctttccaatgcaattagacacccaagggcagtgatggtcaaattgctcaacacagcgatcgcatgtagagcaatgttttgagcgtacaggcctaacaatctattgatatagatgaatcaggtttttaagtaaaagttaaatatatggagaaactcactttgaatggaaataactcactttgcaggttatacatagctgagaccaattgccagccagaagttcagggttgtctagacccctcttcaacaaaggttcctagaggcacaaaaactcaaaattaatattgcatattatgtactaatactagtatttcaactttttgaaggtggcaatctaataattgaacatgagatttggcagattaacaggaagccacattggctctctaaatctttcaagcttacatcatctctttgattttgggcatctcttgtattcttgtcaatgtagccaggatcttttctgcataacaaaatagtatggccattcttcaaacaaatttttaaatgattgaatcaaatatctttaatgtgaaataaaagtagtatgtggtgggcatgttacaattttatatagatgtgcaaggccagaacataatgcattaaagagtgtaggcaaaataacaagatcctcaatgtttcaggacagcacactaaaacgtggtattaattgataaatagccaaattgctctgttccagcaaagaaatcacagttttctttaaaaataaagaaagtgaccttgtacttccaggctacatgcaaacaaagaaagattactttctgcaaggtgagattaatatgttaaaaaacccttctaaggaacgactagatgcaaatgaagaaaatattagtttctgcaaagtgagattaatttgttaaaaaggcccttaagaaaagagctgtctaaagaggcacaattgacatggatctgtctatatgtttcctccagtttttggaatattggtacaatataatcgaatgtttacctgctacacttatagaacataaccaatccggcagtagcaaggaaaattcccaaccatgaaaataacccaaatagtaatgtcatattactgctatattgtcctgaatagaaggaaacaaattcagtaatccacaaccacagtatgaaagatcaaaatttctgaaaagacattatatcagtaatgtacctgagataactgaatatacatatatataaattaagccaataataatacaccaaagaagaggggcgagtcctaattttgatagtttcccaaaataactgttcccaccacatcctctctcatgtactcttctagcattcccctgcatagaacaatcaaatcatcaaatcaatccttagcatttgccaggaataaattacatgctgaggctaacgataaatgttttatacctttaagcaagataatctatactggggaatagttaaaagaatatccagaacaagtacaagagcattcacaatccacaaatgctagtgattatccaaaaacttttactttgttacctccatgttattaacaatgcatattattttaagaaaacattttaattcatatagtaaaagaattaacggtaagtggcactgtggcaggcaatatacagagtctattgggaaatagcagggccgtggagcacatccattcatcatgagagtaatgcttactactacgtattaggtataaaaaataattgtcaatgaagaacaagccaaaaataggtggcacaaatggaaaagcagccaaaaagcatattaacagaactattaaattcccaatcagatggcaacatttacggtatgatggaatcttgggaagctaaaaggatactcttgggaagctagaaggattctcatgtatgataaacaaaaaatggtgaatattcatagcactcacaaggaaaaaggcaacttgccgatgatttttatcagcagcaagttgggctggagttaagccggtattgtcttgcaccataagatcctcctttttaccagcctgaaccagcacagtgcatgactccaaattcccgcggatagcagcccaatgcaaaggagtgcaacctaatgaaaagcatttgagctggaaatgaatatttgatatccaacaaaactaatgcaggggaagcgtgcttaaatgcttgttgtaggttagattgtcatgatcagtataaagatagggtttaggaagagctagaaaaactaactaaacacgtgccttctttatcttgccgccccctatatgcacccaaaaacaaaaggaggcgtacagaatctgcaaatcctttataagcagccctggaaatgtgaacaatattgaatcatcaataggggcaccatgaagccatgttagacaacacattaagtgacaaaaataaagaataccacaaggcttgtgtttgaactttgaaaaaaaatgtacaggggaaaggtacaaaccagtggagaggacttcttccatcattatcagggacatcaggatcagcattccattttgcaacaatatgataaagatatgatgtttgaccatactgtgctgcaacatgtgtagtctgtggtataacaacagatggattccgtcagaaatacttcaaatacaaggtaactgactgactcttgactttttctgcccaacttttaagatcaaaccgggaatttatctactgcagatatcttactttattgttgaactaatctgcatatgtaggaaaaaaatacagactgacatttcaattaaagacctaattccgaatcaaagtgaatatgccaaattttttttttcgaaacctatccttgtaatgactctgttttgtctatagcctacttcacttagtaccttgttgacaaccctggcgactagcttaaggcggtaataaaccctgcagatcactcaaactcaaaaacaaaatgactgtatgctaaaagaattaaaagataaaatataggatctgattacagaagtaaaatacttgtgcattttaatcccatcctaacaacctaaccattattatggtagagatagaagtaattaaatttattataaaggccaaaaatggcaatgttacaaattcctaatctctttgccacttactagaacaacatgcttttggggtactagaggaagtaatagttttatggtatctgacgagagaaaagatttcattatcttgcaggaagccatacaacctagcatcaatgtgtatgaaattacaatttgaagcatcttagtgactgatatagggattatacagcaaagcaatggtaaactattatgtaccacataatcattatagagacattgcaacataacttgagtaagaaacagttggtcaccaggtgaattaatcaaaatacattagacaacagaaagagaatatatatgtgttaaggaaccatggatgcaatagataagtcaaagacaaacctgatatccatataaatcagcggcatccaccttagctccttctttcagaagtagttctgcaacttgaatatgaccacgtaccgcactccagtggagtgctgtttgccctgtatggtctatagcatttacatctgctccatgctgtccagacaacaagctgagaaccgtcatcccaccaaagcaaacaactgaaaaggataggacatactatagagcagcaaagaaaaccatgcaactcaagaagtactatataactacactgttcaacataaaaccgtgaaaccaatggccttaaaagacacaatgcataacatgttgactgggatagaccagtcagcataggcatactcaaatcaatccaagcaaggtttcaaaggggttggcttcattgtctaaacagctggacatgacatttaactgaacaaacttcctatgatcccatttatggttcagcgaaattcttggaaatgcttgctcgcttggtaagatatggcaagaggcaagttccacagggtttcctaacactaaaggagctgcagattggccctgcctagacctatccaacagccaccattcaaccaacatagcattaacatccatccaacacataaacacaaacataccaaaactaagctcaaaaccgctaccctcagagcaaaagcgaaataccttcctgtcattacaagccacatgaaccaaaatctctcctcatcgatccaaccaaaaaaccaaacgagattcgcaacaacaactaaacaactcgtgcccatcccccacagcgcattcccagcaggagctacacttcgtctgcacctcaaacaacacatcaccggggagctccgttgctgatcggggaaagggcaggaaaaccgaattcctaaacgcgcaagctcgaggacacactagcattacccaagctcggggggcggattggattgggcgacggcgatggatcatacctcgaggatgtactgggcggcggcgacgcggttgttgagggcggcccactggagcgcgtggtagccgagggcgtcgggctccgtcaccggccggccctcccgctccacgaggcggtgcagcttctcgaggtccccgtacgccgcgcccgtgtacacgtcgtccttgagcgcctccgcatccgccgccgcctccccctcctcccccgcgcccgcgcccgcgacctctccgcctccgatggtggcggccggggcggcggcggcggcggtggtgtcctcgagcacctcgatctccgacgccatggagggagggagggagggagggggaggagggatcgggggattgggtcgcgcgtggcttggctttggcttagcgacggtctcctcttctcgggggcgttttgactgggtttttcttttttttttctgttttgttgtttgggcggaggaagacggccaataccgcaagagggagacgtgggaaacgaacaagcgggttcaaggaagaacgagatgccgaaatggcgattgatgattccttcttggcaacgccttttttgttttttttttcagatttcctttgctttactcggttcggaaagttaccacgaatgtagcttttgttcagtcatatttaagttactcctctcataaataaggttgtaattctactatattgttgaagttttataatcatttatttatacacttatcacaattaacttagaaaaaaaagtatgagcattacaacaggtaaagacgttttctcaataatacaacagttattaagaagatgagcaataaattaaaatattaaaatcgttataatacattataattgaaaaagttaatgaaaatacttccttgtgattttatagtcagaaagttcatagagggaggaggaagaagggtttgagatagagaatgacatgtggggcctacgatatatttttgtgtatgaatgatagatgtgtctcacatatatttttttaaattctaatgccacataagtatcgcatgggatgaacaccaggtcaacaccgccatgtcaacgccacattagcaaaaccgtccttcaaaactgctaggaaagtcaaatcacactggtttcaatagttcgagagtcgtcctatccgatgtttttttagaggggtacgaattatattcggcctaaagggagccaagtggactttatccgatggtaaaagcctgttgctgaaatgccggcccatatacgcaaatgggccatcttgggccttccaaacggcctgatctgtcgcagcacaggacagctgctgctctgggcgaaaaaaaaaaaaacccctcactggattggctctcatctcatcgatcctgctcacccttcctctctctcctcctcctccccaccccaacgccatggctgccgcggtcgcctcccatcggttcctctccgtcgccgaggcgggcgccgccttccgctggaccccgtcccagctcgaccccaaggtattcttctcttccttcgctgtacctggcagcctgagccgccgtagattggagatccatcccgacttttggaactccctttttttcggtttgtcgtctagttgctgatccaatttatttattttctttttcgagaaattaagccatattctctgtgttggatctctttcacgcactgtggtgacacaaatttgaggttatctgttgagttgaagtgtttaacttgatgggtagatttagcttgctagagaaattgttggtagttgttggtggggaatttggaattcggttcatactttccagattttattgtgttgcattgtgctatttgtaggattaaggagtcaattaactcacgactaggggcactagggggaattcttggcagtttgttcatagagatttaattcgcccttttcagtttgcttatgttgcattgtgttgtactccctccgtttcacaatgtaagtcattctagcatttcccacattcatattgatgttaatgaatctagacatatatatctatctagattcattaacattaatatgaatgtagaaaatgctagaatgacttacattgtgaaacggaggaagtatctaggattaaggagttacttttgtgtactgttcttacgaataggataacgtaatgtgcacagaggaatttggagaagtttccgcatctggtgctctattgttatatgatagtaaattacttggtggttcatgggggtctcattgatgttgtgcgtgcccttgctggatttatcatgtctatgttcagagcaccattcactgaaaacctatggtccagaaatttcgtgcttgttaggaacctttatatttcgagtgttgtccagaataaggcctaaaagtgcatgatgtatacatgtatttacatggtttctgtgccaatagtgtcttctgcaaggtattactgggattgtttttctccttaactgaagagaaaaccaggtgaactggtgtttcagaccagcaagtaaagtgtgtttactctattgtactgtattggctgctatgttctttgttttatgaccaatcatccatcactatataaactccctccatcccaaataggcttccatttgtcccacaaagattttatttctaacttctgagttatacctactcccaatgtacatttaattggagcatagaaattgcaaccgtgattattaatgaggggcaccttggccttttcaccacacttctaatttgccctataattgctggattaaagtctttgtggaacggagagattgccttgtataattctttaactgggatattcaagtggtttccatgtttctaatgatttcactgtttggtgcatttagcagccccccgcatggcaacaatggcctgtcatgcgccctatggcctttccatattaccactgtctactatgtcagtcatatgttctattcggtaaatgtaaatgaaattagtacccatataaggagtaacattagctattgctgtaggataattttatggctaggggatgtggattagaccgagttttgtctgactattcacatacaaaattacaaatgtattgtgttagagctattgatgtgtaagtttgttgcaagagtttcagagtttggcactaaatgcattgtaagctagtgttttgtgtttttctccttatatttgtgcctggacgacacaccagaatggccttgtattaagatactccattcttggagctaaactggaatgaacaccatattgaagttaaaatattctctatatagccttgtcattttcattccaaaaaggaattgtttatccacgtagtatctttcattttaatgtttgctacttgtgtaatataataattacccttgggaaaaacctctgctttggtctgatgagcaactctgctatacaccaatcctccatcatcagctttaaccccttccttttcttttttgctatggtatccagatgttgtcattgcaaaacgaaatcttcattacatctggtggagaccgggatttgattaataggtatgtcttatacccctttgcaactgcagttctgaattcattagtgttgaatacatgtattctatccatgactgtagacatattaatatctcatctcaaagctgaggtttgtttttgacccttctcctaaaggattctcagcaaaagcaaaactgaaacggttcctgagaacaaggatgatggtgagtctgatgatgataacgatgaggagggagatgacgaggatgctgaaaatcaaggcgacgatgatgctggtgatgaagatgcctcggaagaggaagggaatgatgaggacgaggacggggaccctgaagccaatggtgaaggagggagtgatgacgacgatggtggagaagatgacgatgacgaggatgaggacggggacgatgatgagggtgagggcgagggcgaggatgacgatgaggatgaggaggaagaagaggaagaggatgacgacgatgacgtcccgcaaccacctgccaaaaagaggaaatgatcaatgagtaacagccctaccttacaagcaagaacgtggctctgttcatcctgtgcttagtggttcactggttactggttagcaggtaggggttttagctcggtcgtcagccatagcctagtttgagaacaggaaaaaagaacacttagttgtgcatgtactatttaaaagattcttttttatcatgtctctcttctgatttgctaccgatttgtgtttgcttagccctttttacattgttgttgtaccctccagacattagacatgaatggatgtacgtaataatgcagcaatgcaagtaagacagcctcgttcttgtgttcctcgtgctcgaatggattaattgggttgccactatgaatgggttttgtgttcaaaagtcaattcatttgtaagaatagtatttaatttataagatgtgccatttatttgtcaagaataaatagggaagaaaaggagaaaaattttgtggatataaaaagaaaaattacatttaggaaagcattgagagaatgagtggggagaaccttgtaacagcgcaacaatttggatgcttcacgtcaatcaatacccattgctgcaaaattagaagattttttttttaaaaaaaagacaatatcatcgacatcaatcatcatcatcatcctcatcattttatcgctagaaaatggcaaattttccaatgctccttgttcactgtgccacaggatgacttatgcagctggagacaaaagctaaagaggaccagagaaaattctgggatcaaaacacaaggttggaacctggaactagaacaaaaatgggaaatcaagtagacaatggagtcatcaactcaaggagcaaatcatgacaaaatagtctacatattttgctcatccccaacaaaactatggcctttgttacacccaacgtcgccggtttagaacaacttgaagaggataccaccgtgggtggcgaagaagggggcgaaaacgagggattcgaccgccatgagcttgatgaggatgttgagagagggtcctgaagtgtccttgagagggtctccgatggtgtcaccgatgacggccgccttgtggggatcggaacctttgggaccaagggtcctggcatgctctgaagctccagcctatgcagaacaatgaaaagaaagttaaggtaacatgcaggattgaacccaaaagaaaaggaaatggatactggtagatattgtacctcaatgtatttctttgcattgtcccaagcaccgccagtgtttgatgcggagatggcaatctgagagaaggtgaaacggataaggagcacggaccattggatgcaattgtaatcctagaattcagaatggttaccaacctgaacaccagagacgagagcaccagcaaggactccagagagggtctcgacgccgaacagaattccgacgataagtggggtgagcataacaagagcaccaggagggatcatctccttgatggatgcatcagtggagatcttgacacaagttgcatagtcaggcttagttgtgccctccatgagtccagggatggtgttgaactgcctgcggacttcctccaccatctttagcgccgcgctgcctacactcttcatagtcattgctgagaaccagtatgggagcatagcaccaacaataagcccaatgaacacttttggtgtcagaacatcaaccgtagagatagccgcacggctcacaaaggcaccaaaaagtgcaagtgacaccaaggctgcagagccgatggcaaaaccctgcaaatacaaaattacgatataaacttttcttttaatcaaggaagcttaccatactgaagtggtataacatcatcatcataattagaaacaaccactttctaggcatgatcgacatcttgagggataaaaaccttggtataaatttcaactaaatgtgaacctatgctacagttatgcatggagatcatcaggaagaattgactaagttcggtgcaagacctggaaattaagaatgggatgggtaggcagatatgtacctttccaattgcggcagttgtgtttccggcagcatccagagcatcagttctctcccgaattctgtggctcatgccggccatttcagcaattcctccagcattgtcactgatgggaccataggcgtcgatagcaagacctgtggcaattgtgctcagcattccaagagcagccacagcaacaccatacatggcagcaaggctgaagctgaggaaaatgctgaaagcaatagcaaaaatagggatgatgactgatttgtaacccaaagcaagcccaaaaatgacattagtggcagctccagttctgcaagaatcagcaacatcttgtacagggctgaaagggtaaacaacagagatgtcaaaaggtgaagaataaacataaaaataatcaccacataaatgagcaaatcgtaaatacctatatgcgttgctggtgtaatactcggtaacaaatccaatgattagaccagcccaaagaccaaccgccacacacaagaataattgcctgataagtgataaattaacagcagaatgaggatgaatcataaagttaattatatagcccaatgatgaatgtaaaaacaccgtaccagctttgcactgtcttctgggcaccaaagttaaagatggtgaaggtgtaaggaaggcccaaccaactgacaagggcaatgccaacagtcataaaagcagtggaaattataagctgtttcttgagagctggctctatttcactcacagcctttatctcaaagaaatcagttgcaaacaaggtggttatgagacacgctataattcccacagagctgacaagaagagggtacaccatgggagtaaattcatggttgattccaaaagaagagattgatgccacaacaagtgcagcacacgatgattcagcataagaaccaaaaagatctgatcccattccagcaatatctccaacattgtcaccaacattgtctgcaatgacctgcaagcagaacaaaagtcattcttataccatgatggtttgaccagagagaagattagccactttgcagttttggtaaagtgagattttcctaacagtatatttatgggaatctttagaattcaagtgaaagattcttacagctgggtttctgggatcgtcctcaggaatatttctttccaccttcccaacaaggtcagcaccaacatcagcagcttttgtataaataccaccacctacacggccgaaaagagccatagaagaaccaccaagtccataaccagtaatagcttcaaaaaggccttcccagtcatcaccataataaattccaaacaaattaattgcaatgtaaaggaccaagagaccgcttgcagcaagcaggaaacccataacggcaccagaccggaaagcagtgataaaagcctttccaacacccttcctggcctccagagtcgtccgagcatttgcataagttgcaatcttcattccaagaaaaccagataccagagaggtaactgcaccaagcacaaaagctatagtgctaaagatagcatttgcaagggcaggcttgcaagtcttgtccttgctgtagtggcaaggctggctcttcgtgctgaagccctcaacagacccaaggaagaggaaaataagaactgcgaagatgctcatgaataatccgacatacttgtactcagtgaaaaggaaagatgtcgctcctattaacaaaaaaaagaaaaaaaagatggaaggtgagtttagttcaggttgtatccatgattgcaaagtaaatgcgagaaatgaacaaatgtcacataagaataatatcagtatatcaccacttatgtttgctaatgaaagttttgtgacacccacaaacaagtaggcccaaatcgcaaagagcatggtcaacaaattctatacaaacatactgttttatatcaaggtaaatggtactagttcatccaaaaggttagaataagtttttgcattactcagtttcgatttcccacttttggtgctgtcaaagtcagaatagcatcataggcgtgtgtctacatcaaaccaatgacaaccctgaactacagacgaatggtaacaaagaaggtcatctaaaaagatgaatcgattggttaaatgagaaccaatcaaaacctatccactaaaatctagtagatctagagaggtattcaataattcagccaactggcactgcaacaacaaccaaccggatataatccactgaacttacaaccgtcaaaactaacaactgcagagacaaaactctggctcagcctattgaaaggagctccaagcaaaggacgcgatgaaaatgctaaactatttggcaagtcctgtaaaaccaatcatatgcctgccacctttttttttttgcggggaatcatatgcctgccactaatgcagggaaactccatctaaccaagtactcctagtcacttccatgtagaacatcacaacaaagccagcacagcctgtgcgccaagatatttccagagacagcatctgacacgtctttgtagttattttcatagtgatttaatgaaagctaatactaacatactatcttccaacaaacagatatcactaagacactaacaaataattttggtatggtactgagttgctgacacccacaagctaagtttttttttctttttaactggggacacaagccaaactattttactagcaggtatcttccataatgcaacaaccttgtggagtgtctacatggatcactaaatgaaccacactcacatcatgccaaatattctggtgagctcgttgaaattactatggaaacgcaaatgtggatcccaagagataaatagattcttgaccggctgcttgttatcttatcagaatctgcagcctgaggaatggtgaccacgtgctgcacgaacttatcttttcatttcatctctgaccccacacttctgggcttcctcagactgcaagaacttatcccctttcatctcttaccccacatcacaaccaccttaccaccagtttgaccaagaaccccacagtcccataatgtaatttcaagaagataataattaagtggagtacttaatttagatatatgaacatgtgatggattactagtactactagctatcaactctgagagcatgctaaagtgaaagttattataatcactgccgggtaaagtagcaacagccaacagcaaatagtttaatgcgttgtttaggtccaaccaatgtggaataatatagtgtaatattgaccacgaacacacgaagcaaatactctctactacacgtcaacaacttaagaaaatgactgaaatcttccgtcaaaattattccaattaaaacctcatttctttaacacaaaagtaagctggtatatactagactattgggagtagaatactagtatcaaccatcaagcacaggaagagctcatgccatcgaacaaaacaaaataatcgcatccccactgtttttttttaacttgaattcatcgctttgcaagtaagcgataatcaaattccgcccaggaaaagagaaggtgtgaattcccgcgtttgatttgcccctaaacatcacccccggagtcccggatgaagaacatcaattcgcgctcaaaaaaaaaaagaaaacacacgcaaaccacgtaaaaatccgatcatgtaccaagcgaactcgacgactactcaaccctaacgacaagatctaccgatcgatgctgaagaacacgaacgcgtacgagctgagctacagagagagagagagagagagagagagagagagagagggttgctctgctcaccttcggagatggcggtctggatctcggcgcacttggagacgacgttgtggtcgttgagcccctcctcctcctcgatgaggtagtcgctcggcccgctcttccccccggcggcgccccccgcctccccgcgccgcggctccgccgtgagcttcaccttggagacgagcgcccactgcagcaccgcgaacgcgatccccaccgccgctgccaccgggatcaccacctgcgccgccagctccggcagtatcgccgccgccgccatctccgcagctaagctccccccctctcctcacaattcgcgcctcggatcgcagagagagagagagagagagagagagagagagagagagagagagagagaggaggtggatgagaatggaggagaggggacgcgaggagaggagaggcgccgagcggagcaagaggagtacgcagcagagtgaggcagcgagctgcgtgagagggagagggagagggagggtattttggggattttcttggtggcttgagctgttgtaagcagcagaaaattactaattcagctttaactgacatgacatcctttggtttttatcaaaaaagtggatttattgcaaaatggttttttttatcctaacaatatattgtaaaaattacagtagaattttttattgcaacaaatcaagttgttttttttagttttgttaggctgtaaaatataatgtatctctccattataaaatataggtattcttccgtcttaaaatataacaatattgatatagtgttagattagacgcaaaataatactacgaacctgattgtggggcatgtctatactattttgggacagagaagatatttttagagttttcgttgagattgtagagaaaggtgaaactaaatcagttatggttgtgatcagctgagacaataaagcatgtagataaattaatgagagatggatgtggtgggttaagatgagagagttggtatataagttgttatactttttttatataaattttggatgccagaaattactatattcaggatggagaaagtatttaaagcaaggtttttgataaaaacaagatatcagaacaactcaagttgtgttctgaaatgccgaaggatgaaactatgttatgaaaattacttgatggcgcaaataaatagttaaatattagaaaaatcaaaagatcgaatcaaagagtttatgaagaaatattgataaagaaagtttttcttaaaaaaaacatcatcacattcgttaaaaaatatgttcgtggttatttgttatctgttagctaaaaagaacatgttgtcacaaaatcaatcgagaaaatccaaaaaatgtcattgacaaacacccaaattcaagaaataccatcgacgggtgcaagtttcataaaatatcattgtacaagcgattttgtttcaaaataccatcaccattagggttccatctatctcgtaccattaaatgcattgtttatcctatagcacttaacagaggttgctaatggaaccataacaccgtggcatttctaggacagtacaatggatttcataaaatttatactcatcgatgacaattttttaaaaatcggatcttgttaatgatattttttggatttttccaaatcgattaattagactataaagcatacttaaaaagccgaagatataaaacacttttatttttaaaataaaaactttcatttgtaacaataatactcagattttccagagaaaaatagatcgactatggcagcgacatcacattcaccatggaagggaccatggagtgatatcgacagtttgcggtttatatcacgcgaagaatcgttgtccacgccatgtggctatgtatccatctctactctacaattgcaacggtaaccatcacctttcgggggaaaaaaaccagcactgtttcatcagcaaatcatcgattgatcatgtcaaaagcgaggtggttgtctctgcgaagtgatttctccacaccaaccacaccagaaaaaatcaccacgagccgcatcagttgtcctaataagtcaaaacaaaagctaaaatttatttttttttaaatttgattttaaacttgattttaggatattttcaacgtaatttctttttagcgttggcttttaagtcgctataaacaaatatgtaaaagttttccctgtaaattaatttttattctggcttattagggaatatgggcaaccgatgagactccggttgtttgtgttcttaagcttttcgccaatgagatgacctgtctaatttggttgttccaaaaaaaaacagacgagtttgttatgcagtaatttcatccatttctcgtgtattgatgattttttttttgccgtaatcgtcactaaatttcaacagtactgccaattaggtagattttagacgaaatttatcgtacagatcatcaattaatcactgaagtctactaagcttaaacgtacatagtatatatgatatgatcacacaaattgagtatgaattcttccattattattatttgtataataagatttcttttcgatatgatcacacaggtttggtatgaattattccattgttatttttgtacaatacgatgtcttttcagttttcttgatgctcctaatgcaatggtaggtaagatactcttccagtcttcctgacagtgatcctttttatacaaaaaaaaaagagagagattcagagacttgtataagaatttgaaagtgacatgtaaattctgtagattcgtagtgtcactgctacaaatataaaatcaactagtaaattacaacctgggaataccaaattaaatgaaacaacaattgcatcacattatcatcacaaaatccaccatgtatacttatatatctagaccagacaatttagtttctgaagttcggtcataactgcactgttacttcacatgagtaaattagatttccatcattccatgcctgaaattaatcatcaagaacagcatgcctgaactctgaattctctgaaggaacaatagtagctgacaaccacagctcaactggtcgctttgtcttcttctccctgccacaatgattaaccttagctagcttaggttcttaacaacccagtgagcttcaccttttcaatattctcgtcttgccaagaacatattccaacatggaaaagggcacatatacagattccgatgagatgaacttttcgaaatgcgtaaaattcctcgctggctacaataatacatagcttgaattgaacgccattgaactgcacaaaaaatcacaaatcttctagcttaagagcacccgcaatggtaaagtaaggtgctatctataaaacatgtacatctcagcaatagactagattaatagtaaaccgcctcaatagtatatctacatgggtatctatagctctctcatgcattgcctcgtttttctctatagactatctctaacttagtagatagctttgctctctctctcttcatttaatatcttccatgtagaaaaatatgctgacatggatttcttgtagagagcctatagataactattatgggtgccctaatagcttcatctgaacaagaagttcagctaggaccattgaacagatgattgtcccaatcaatcatactaccattgtctgaaactaccaacctccaatctgagaagggaaaagatcaggatgcagagaattaagagatcgatcggcgaaaaacgccaagcgccatacaatgtgatcttggatggataagaggggatgatgccatggaaactcaggccacaataattcaaaacacaaatagtagaaaaacatcttgcatgcctgcttgcttaattatgcagatctttctacgtgtggttctgtgaatttggagtcaggtttctcatcgttttcagatggatggatggatggtaccttcctgattgcctgcattgcattatatttcatttgcatgcatgcactgtgctattggtccccttatctctttcaggccattgcaggacacacataggttctcctatggttgagaccaggcattgcttctagctagctcccagctgtaaaggaacagtgttggttttgtaaatttgtagtttagtgctagtattcaagtttgttctttagggtttataaggcttaagtgcttctcggacgagctactttgtatactatttttttttacaatacccttttgaaacaatttttcacctttgtaatggttaactcattcatttgtatcatcgaatataataataatcacaaatcatattcatctagtttttttaactgttccccctgcacggtactcacggtatctcctcaagaacagagataaatcttccatatataagcactataattgtctatgactaaaaagtatagtcaccctgaaatgttgaaggctattgtcgtcaccattcatttacctgtcatctaggttaattaagcagaagaacaattccaaacaataaattgttaatcaaaataaaatgatgattaaagtttaaaaattttaaccaaataaagttgatagtgtcatatatatactgatggagtattcacgtaacaaagcaaggatcattttcagcaaccaggagtccttgcttctatgttcttaaattaccgtttttgagtttgttctgactataacttgccctattaattgtacttaacgtctttaactatatttaaactcattgaaatttaaggtgtgtttggttcttagccatattttaccaccatttgtcaataaatactatcacacttgcttaagttaggcgatcaaattgttaaccacaccttagcaagtctaagagaatcatgtcacacttccctaagttaatgacatgtggactcaatttattggaaaagaattttgccacaattgtgactacaaccaaacaactaccaatatgatcaaatctgtctaaccttagacgtggtaaactatggctggcaaccaaacatcctcttacaattgcacaaaaaattaacaaactaattaatgttatgatggcaaattaaagggagttaaaagggccaagtgatgtttctttgaaaacttcaatttgttttagactcatggcatggacaaaaaggatctggagactctaacattacacctaagttatgtttttaatcaagtttcaagataaacattacgatcgacaaacaagattctcctattaggttttgattgttatttagttaagctaaatataatgatgagtcatcgtgtaccaaacaaggaatccaggcaccaaaaagatatatttaactaagcatatatctctagttgcctttattcccttttactttttcggctgtgtttagatccaaactttagattcaaacttttaactttttccatcacatcaatttgtcatacacacataacttttcagtcacatcgtaccaatttcaacccaaacttctaactttggaaggaactaaacacagccgcgtgtgtaagaatcactttacacagcatgaaaaggactgatgggctgacacgttggctatattcgcacaaaatgtttgttcattgtttatcgaaaattgacagaattgagccaataaaaaaatgaagtggacataattcatatatttgccttaaatctcatgaagaaatcatcaacttttaggtagaagaataaatggataatccaggtaagacttaaaacgtgtcctttagacgcatctgtttgccttttaagtgggatacttttgtagttgcgcatttgagaacagtacgtgaaataaggataatgataggaacagtttcgttcagaaaaaatgataccatgggacacgtgagaatattgccacctgttggtttcaggggatgatcaattaatagaagtgtaaattttatctacgctaagttgtataaaatcatatagatttattaaaaattttaaaatatgagataaagccctttttaggtttgaattaatttaaactcaattaattatgtgttaatgatttattttgcgtggctgtacttaatcttcatattcatcggattcaaacgggattataatatctgaagttatgtgtcccacgataaaatcgttgtggttttgtatataacttggttttatgaaaattactgttaataaaacaaagtttatgggatccaatcgcaataaagaaagtttatgagatctaatttgacactgaatggctgatccaacgaaataactccacgtcaactttttatgtatgcatagagtataacataataacaatatggtaagaagttttagctaaagacaagtttttacacctacactaaagacaagcttttggacatacactggagttaagcagatctctcatatctcgtgtttttatatcaacagatcgacggtgaggtttggttatctcgaagttggaggcgacgtcgcgggggttagggccagcagggctcctttgtcgagcatgccgcgagccgctgccatggacacgggcttgagagatggtgccatggcggagacacacctcctgcttcgccacagcaccacgaaggctaggcaagccggttgcccgaccacaagtggagattcgtattttcgtcgttgtttctcgctcaatttcttctgcatataataaaataatatcgtaagtgttcaacagttaattaacatatttttatagtgtcctatagtataaacacattcttatggtgtcctctagcagaaagcgtaaatttaggtgccacgaaataatgattttgactatatgtgataatatgatattaagctatatgttactccctctgtcccataatataagagataatggataaatgtatcttatctgttcaaattcattgtactagaatgtatcacatccatccattatcccttagaacaaggctaataatacaaccgacctgttggctataaggttatttgtagccttctctcagcttgttagctataagggcagtcccaacccatagtgtccataagtagtgtctatggtgctatgttaataagacatcacaatagaaactatactccacaacccatggtttcttaaagtggaccattaataaatacaacatctctcttctctaccaataatatttattctttatctattatgaagacactattatctcccaatgcaaaacttaatagtgtcgctttcgtgctagcttcatcgatgttacccaccaaataaaaagcctgttcgggggaagggcttatcttcaaattcggtatcaactgagcaaatctccaaaatgctttttcccataggaacagaggtcaggagctggcggcagggcgctgcttttaatctgactgatggctcaagataagttgaagacccctttcttcaatcccaccttagttcgatggaatgcaactagatgaaattactacctttctttattcaaggactaaatagcggttcatatggctttcgcaacacgccaacaaagaaccttggtttcgttgcgccctgtattccgaggcgaccatttcgcgcggttcgacccatttcccgatccgaaaaatcgtgggtattcttgcggttcaatctattgaagagcctggcgcataggttctcgtgttgaagctgtgtcttgcatgagacccagtttcttcctctcttcactctctctcttaattaatatagtgccacataagttaaaagtcctacatggcaatatagttaatgctatagacaccatcctagttggaggtttgggactgccctaaggtccaaaaaaaaggcaaaccctgggtttccgtgtccaactttgactgtccgtcttatatgaaatttttttataattcgtatttttattgttcttagatgataaaacatgattaatattttatgcgtgacttgtctttttaatttttttcataattttttcaaataagacggacggtcaaacgttgggcacggaaactagggtttgtcttttttttggacggagggaatagctctttacaattaatatatggcccacttgtctctctcacagagtttctttgtttttgtgtccaagccggctgtaagttgacaacccgcttctcctctatttctcctccacctcagtatttagccggtttatagtctactattatactcgctcttatattacaggatggagggagggggtaattaatactctaggtggcatctttctctttcttcgtcgtcataaaagctctacgtgacatctttttccaaatggtgacaccacatcgtcattcttgcccttaaaacacacacccaaaaaaaactattcccccgtcccaaaataagtgtagttttacactattcacgttcaacgtttgaccgttcgtcttatttgaattttttttataattagtatttttattgctattagatgataaaacatgaataatactttatgtgtgactaaatattttcaattttttcacaaattttttaaataagatggatggtcaaacgttgggcacagatatctatggctgcatttatttttggacggaggtagtattgaattccattgacacggttctcgttctgtcaatcatacgttgatttgacttgactattcggacaatgtaatttattactacatccttcaataaccaaaccgtggtaaaaataccgaatgcaaaagagtgaaaacgttaaggcccaaaacgacctcaaacttggcatgtctattttagagttgggccaaattgttaagctacacatgatggtctcaaagaagaattggaccaaacgtgctccctcttattatctttttttatttcacaaaccatgatattccctcgaaattgcacttaaatttagaaatggcgtcagtactgcttactaatttagtattttttttcgaagggctcacctaactttgatggtagcctgtccaaaatctgaatggaatttgattgccctttggaaaagatggacaaatccaccctgaaaaacaaagtttttttttaaaaaagcaagatttgtttgaatattttttatatatagaattaaacaactatttatttcatcatcagtccactaaggctgtgtttagatctaggggtaaaaagttctggcgtgtcacatcaaatatatggacacatatttaaagtattaaacacagactaataacaaaacaaattacagattccgcctataaactacgagacgaatttattaagcctaattaatccgtcgttagcaaatgtttaatgtagcaccacattgccatatcacgaagcaattaggtctaaaagattcgtcccgcattttacacgcaatctgtgtaattagttttttaaacctatatttaatactctatgcatgtgtcaaaatatttgatgtgatatggtaaaaaattttgacaatggatttacacaggcactaatttattattactcattccattacgaggccaccttttctttctccttaataataaaaaaaaccccaaatcggacgcattttttaattattatgcttcgccatttctccgcacttgctccttctcctctccttttcctcctcttccttcccttcccttggcttcgcctccactcctccgctcactcctctccccctccacgatctcgccgggatctccacggcggcggcggcggcatggcgggcaacgacaactggataaacagttacctcgacgccatcctcgacgccggcaaggcggcaatcggcggcgaccgcccctcgctcctcctccgggagcgcggccacttctccccggcgcgctacttcgtcgaggaggtcatcaccgggtacgacgagaccgacctctacaagacatggctccgcgtgcgtggctcccccctccctccctccctccctccccccacctctaattccgcttccgcgctctcctccccgttgggtttgtttgattgatcgatcgatcggtggatcgatctgtgtgcgtgtgcgtgtgcggcgcaggcgaacgcgatgcggagcccgcaggagaggaacacgcggctggagaacatgacgtggaggatctggaacctcgcgaggaagaagaaggaggtgagctcttcgctccgttcccttcgatgatgatgatgatgatgatgatgatgatagtgtgcgtaggttgcagagagctcagccagtgactcggtgtaattttgattctaatggatgaattgataaagtgtggcgtatgtgatagttacttgcttagatggtgctggatctgttcagaggggataattaacaaagctcttggtttatttaggaaggatgctttgcctgcttggcattgctttattacagagagttgtttcgtcatctatgataagacttttagaagacattgagccgagttactgaacaaatgcgggcagcacgcagagaatgctggattgctttgttgcttctattgcttcagttgtttagaatactcttgtgaccgctatgtcattacactacaattgataagcctttatgtgtttgttccattttgacccctaacgttctaggtagaatgtgaatgaagtcatttgttttgctgcatcttttgtttgaggtattacgatagagagtatctcttgctactgtttatgtcatcgtgcctcgtgctacaatcttagaagctttaaattttgtcatattgctaagtacaatgtgagtgcctgaattgtatcacttggtaattcatacatatgaaagcaaaggctgcaaacaaatgtaatatatgaatagcaactcgacctgatggtacatgcctggcacaatataacgcatcctgttccatcatccattttgtctatttcttaagctcttagctctgcctggctattactttgtcctcatgacgcaacgtatcctgttttggctagtccatctgttttggaagtacttttgcatggaagtcttagtcaacccttggtttcccagttcaatgaatgtttcatttttattcttttcagcatctacctacctttcgtgttgtaatataattggctataccaacatgtacaaatattcttgcctgaaagactgatgttggagttgtacctattctgtaccattgtattttgtccttcgcttgtcatatacatgttcagatgttcttacatgcagttcgagaaagaagaagcctgtcgtctgttgaaacgccaaccagaagctgagaaattacgaactgatactaatgcagatatgtctgaagatctatttgaaggagaaaagggagaagatgctggtgatccctcagttgcgtatggtgacagcaccacagggagctcacctaagacgagttcaattgacaagctatacatagtactgataaggtacaaagtattattttaagtaaccctttttttttaccatttgtgaatcattcagcataacatcaggacgaaaaattcaatttaatcaaactactttagtcaaatttcttaaggtaatagtagtagctgctatctgtgtcgatttttctttcttttttattaggaacttctccatacttcctgagtaaactgcagccgagttcctcatcattctgtactataagaataattcaaagaaaatccgacaaatgaagcagtaatttcaaataacgagatggcagtattcttgtttatcatgacatttatttggccatgtccatgacactgaagaactctctcctgttctgggcttctaggcacatgaaaagaaacgaagtccaaagcattatctagctttgatgccctgattctgtagatttccttgattccttctagtccaagtgtaatgctcgtgcattttgcattcctctgtctatttaggtattcacaagcttgaagtggtatacaatgaatactggctctagtaggatgacctcattatcattttgcgcactttgcatgcctttttaggaaagagtggatcgacgctgctattttagcatgcattttgtttctgcatctgattctgttgcagagtttatattatattatatatttatgtgtctatttccttagcttttgggcagtctgttgctactgttgaaagaacaagagccacaacttagaattgacaagatataaatgtatcacatgtttaacaaacaatcatacatcttttgaacagcttcataatgggcagccgaccaaaattttccatgttgattttataatccatgctcacgtggaaacggtgtctgttactctatccttgaagccaatttgtaatgttcattaatcagttcatgcttcgtactgcagcctacatggtctggtccgtggtgagaacatggagctaggacgagattcagatactggtggccaggtaatgctgctactatatcatgattgtgcacatgggatcccaatctctggcaacacaaatttatttatgactatatcatactgggactacaaatactattatgtatactgacattctaatattttcaactcaaaatttacttgagtgtattttaatttgaatccttttatgtttaggatgcagtcttaaattttgagttaggttctaatatccaatggttgttatggcccactggacatttttttttgtggggggtcagggtgggggtaggggtagatgttcttttcctttttggtggtaatttctagtacttttacactttttcctgagaaaactaaggccttttgcattatctgttagtgtatgacagatttacagaccttttctctatttccatttctagtttatctactgagatttttctcatagcagaagttccaacaagttcttaaatatatattcacataccattttgtaggtcaaatatgtggttgaacttgctaaagcgttgagttcatctcctggagtttacagggttgatttgctgacaagacaaatcttggcaccaaatttcgatcgtagttatggtgaacctacagaaatgttggtttcaacaagctttaaaaattctaaacaggaaaagggtgagaacagtggtgcatacatcattcggataccatttggaccaaaagacaaatacctagctaaagaacatctatggcctttcattcaagaatttgttgatggtgcacttggccatatcgtgcggatgtcaaaaaccattggtgaagaaattggctgtgggcatccagtatggcctgctgtgattcatggacactatgccagtgcaggaatagctgctgctctgttgtctgggtctcttaatattcctatggcatttacaggccattttcttggtaaggacaaattggaagggcttctcaagcaagggcgacattcaagggaacaaataaatatgacatacaaaataatgtgccgaattgaggcagaggaattatctcttgatgcatctgaaattgttattgctagcactagacaggagatagaagagcagtggaacttgtatgatggttttgaggttatacttgcaaggaagcttcgggcaagagttaagcgtggtgctaactgctatggccgttatatgcctcgtatggttgtgagtatacacattttcctccccttgcacaacaatttctaaattattgggaaagtatatgttacaccttagggcttttggcattagcaccagctgcctagctgtagttgcaagcatcgtcaataacccctaatgtttattgctttcctattcctgatttttcagataatacctcctggtgttgaatttggtcatatcattcacgattttgaaatggatggtgaagaagaaaatccatgtccagcctctgaggacccacccatttggtctcaggtcactgcacttcctttagaatcctacagagatctcagttactagtataacctttattcagtatttcttgtcttattgaggatagtttgttctgcctgttaaacctgtacctgagtttgatcactgataatctgtacatgtgcaactgatgacagataatgcgcttctttacaaatcctaggaagcctatgattctggctgttgctcgtccatatcctgaaaagaatattacatcacttgtaaaggcatttggtgaatgtcgccctctaagggagctagcaaatctggtaagattggacttaaaccatctcgatgttctgtggtttggttctctgtaatgtcataatcatattgtatagtgtacaaaatgatatatatttcctagactattaggtgctaattttattatgcattgcagacactgataatgggtaaccgtgaggccatttctaagatgaacaacatgagtgctgctgtcttgacctcagtgcttacattgattgatgaatatgacttgtatggtcaagtggcttatcccaagcatcataagcactctgaagttccagacatttatcgtttagctgccaggacaaaggtatgctattcctgaaataaagcaaagaaacttttctatgttttagtttttttatgctgcttttatgttctgtaagtgttcttggttgaaatctaccattcaatgtactccctccattccaccttttaccacaatgtgtgccttgcccattgaagaaattgagattgcaagatttccacactccagctctatttgattcagtaaaaaagtggataattggctgtagatagcatttaaaagggggtacatatggtcattttacattagctttttttaaatagatttagtccctccttggtctgtggcgcaactttgaatggacagatattgtgaaatggggtgggctcttgtttcttctttttttctcctacgtcgctttgcagaagaaccccatgttgcaatttttttaagcaatgtttttgctgaaacaaagattgttttcttgatttttaaaactgaagtatctttttttttcttatggtataataggcagaaggcatcagtaccttatgttcctttcccacttactttggtgttgatcatctgttgatcttctgcagggtgcttttgtgaatgtggcttattttgaacaatttggtgttaccctaatagaggtcagaactttgagagctcaacttgccttttccagctgttcaactttttcagtgtcctaaactccaaatcataaccagtttattatatctatatgcaggctgctatgaatggtttgcctattattgcaacaaaaaatggagctcctgtagaaattaatcaggtgtgtatatgttctaccatgttatatgtcaaaaatacaacaacgcactgaaggggtaaatcactttactttcttgtggatgtttcatgcaggtgctgaacaatggtctccttgttgatccacatgatcagaatgccattgcagatgcactgtataagcttctttctgacaaacaactttggtcgagatgtagagagaatgggctaaaaaatattcaccagttctcatggcctgaacattgcaagaattacttgtcaaggatattgacacttggtccgagatcacctgctattggtggcaaacaggaacagaaggcacccatatcaggaaggaagcatatcattgttatatctgtagactctgttaacaaggaagatctagtccggataatcagaaacactattgaagtcacacgcacagaaaaaatgtctggttcaactggttttgtgctgtcaacttcacttacaatatcagagatacgctcgctgctagtgtctgcaggcatgttgcctactgtttttgatgctttcatctgcaatagtggaagtaatatctattatcctttgtattcgggagatacgccaagcagttcccaggttactcctgcaatagatcaaaatcaccaagcacatattgagtatcgatggggaggagaaggcctaagaaagtatctagtgaaatgggctacttcagtggtagaaagaaagggaagaatcgaaagacaaattatttttgaagaccctgaacactcttcaacctattgtcttgcatttagagtggtcaatccaaatcatgtgagccttccaaccacacactgacacacagatttatcgtgtgtgatgtgtgctattaatgtttaatgtttttttagacgttcccttttgaatgtttaatgtggtttttttcattgtagctaccccctttaaaggagttgaggaaattgatgagaatccaatcactccgttgcaatgccttgtataaccacagtgccaccagactctctgtagttcccattcacgcatcacgttcccaggcactaaggtttggcatcttcttttgcatttttctttccttcatttataccaactcaccatagaagtatttttccattttgtgttgcctaacttcaataaacagtgaattttgaagttttaagtaaaaaactgtctgtagttccatactattttgcttcaaacagagataataacaaaatgtgcaatatgattccttttcaaactcatgccagctttaatattcgctaaaatgaacgatgatgtgaacaaattatcattgtttacaacacagtagaaggatgcttgctgtaattcttgtgtgtcattgtgctgtgcacctaaccatttgcacttgctcagaaatgaagttttatcttgttacccgttgtgctgaccaaacctaatgttcatttaggtacttgtgtatacgctggggaatagagctgccaaatgttgcagtccttgttggtgaaagtggcgattcggattatgaagaactgctaggtggtctccacaggaccgtcatcctgaagggcgagttcaacatccccgcgaacagaatccatactgtcaggagatatccgttacaagatgtcgtcgccctggacagctcaaatatcattggcattgagggttacagtacagatgacatgaagtcagctctgcagcagattggtgtgctgacacaataacaccttctagcttgcataccacacaaagaaaacgaaaagggaaagtaaagaaccaaaccaagaaccactatttccatacttgatggaaatgccgattttgttttgtaggatgcagagtttgtgtgtgtgttccattcctgagctgtgaataactctccctccttttgtttgtgctaagttcttttttgaagtgaaccatgtggatacatcaaaaaccagacacaaagatggtttaaacatccatgattacgggaaaaaaaaccatacataaagaatagaatggttcagagcgagagagctctaaaatgcaagaaggccaacttaattacatggatggagggagacagacctctcgagagtgtgtgctcaatacgattttgttgtgttcaatgtaatccaatgttcattatggtcttatatctttatacatttcccttcaatcatgtactgtactgatttaatcactttgtttggatgctctgccatcttcatgttgatcttttgcagctgttgaggccgccgccgccgccgccatggccggcgatcgcttgctcagacgggctcgagcgagcagaaaactcgccggagttggcagctcgccggccggtgcaaagcaggagagcacaccggcgtgcgtgcatggcccacacgtcaggtgataaggtgtcgaggtcgggaatcgagtgaaaagccacccgttgcctgctaaaacgggaatggataacgtcggacaaaaatccagaggatcgtttgcagccacgctccacgcaattgaagctggacaagtcgactttattcccccgttttgacgcgctgaaataggcaggtatccgtatcaagaataagttcgtgaagatcggaaaattcatagtagagtagtatatatctgaagctaactccccccctgtgcaaataatagtatactttttttaggggataatattttatatagattatacttgacagttggaagtagaaatacaattgtaccgaacagattattggagatgagtagaaaaaaaataaaacattgccaccaaaccatactatggttgatcttttttaatacaagagtccaaaaatatttgtttttcttaactaaaatctacgggactctgaaatgcaacaactcttcaggaatgagacacgagaatttgtaaaagtttttttttatcagaatttcgtatacagcaatggagaaatattccggcacccatagtcggtttattggcttattagctatttgaattttaaaacttaatttagagttgattttggagtttcttttatcgtagtctaacttacagtgttaacttttatatcacaaattatacaaacataaaatattttcctattgtaaatcattttcttacttcattcaaaattttcaattttttaaaggcctcaacatgagagccaatttttctaaatggcggctaaaccaaaatgcagaagattagaaaaaagtgactccctccattacataataagtttatttttaacctctcatttctcttaaaaataagttcattttaagtaatcagtttgtattgaaagcatataaaaaagaataattatattgtgattcaataaagtaagaatatttttttttcttgttatattaaatatacgtgaaatggataaaaaataaatttatttttggaacaaggaagtaaagcgtagtgacctgacattccaacatccaaaagcgagtagtagaacacctggccaaagagaagggtataaaggtcagtacgcacaagcttagcagccgctccaaaacgcaataaactcatctgcgcagctgaccgaccaaccaacccccccccccccccccccccccaaaaaaaaaaaagaaaaagaaaaaaaaaccagcaaatttcccttcccatgcgacgcgacctcctcctcggcgactagccggcgaactcgcgcacgccacctcggcccacccaggcccaggcccacctcgccgtggatcgccggagtagggggttgccggccggagcggcggctaccaccagatggtcggcggcgggggcgagtagcgcgacggcggcggcgaggacgacgagcggcggacggatctgcggcgcggcggggcggcgggggcgggggccaccatgtctgccgtagtgtgtgggaagaggtcctcctccatcttcggcgacgagctcatcccttcctcccctccctccccatcccctccccaccaccaccaccaccccgccaagcgctcccgctgctccccggcccgcgccttcgacgaggcgactcaccgccgggaggcgctcctgcaccatctcctctccctcttcccccacatggatccccaggttcgcctccgagctctacttatatcgctattatttcgatttttttttgtgggagtttgcaattggatgcgaagaggtgaatctccgtccagtaaattatgtggcttgttgggttaaattctctggtgcctggagctaaggatgcaatagctaatagctactaccaactatgatgctgcagaaatgttgaacaatagttagatagcaatggcctatccatttttgcaaccaacctttaggaatcgaagtgctactaatatatcatgtccgtccgatctccgatgatctgatggctggccatgttttcactaattttacagtattcaggaatgtaagtgtgaatgtgtaatcaacaaatacggcaaatgtgtttttttttgtcagcaccttttgctatcttcaattgagcatgcatatactgtaagaaactggattggatcgcattcgtcatgtacattttttgcaactaaagggtgtttccatcacagctatgtggtgtttatatttttagctgtttgatgatgagtttccgcatgattacagttacttgaaagagctcttgaggcatctggagatgatatagattctgctataaagagtttgaacgagctgtgcctggaatcggctgcggtaggtgattccaatagcgtcctgccagccgctcttaagttatcggctgaaggtacgtctgttgaatttagacagttgcatgctaaacatccagacattcattgttcatactttcctgtgttgcgctggtccaatttgattgttcatagacatgttggatacctgaagctgttcatagacatgttggatacctgaagctgtgaatttgaactctctgtttggcatattccccacctctctgctatgcctttattgtaatgtactgtagcatttttatgggcaacctgccattagcgtgtaacaccagagtgggtgataaactgaagtgccatgttcttatatcccgtttaaatatgatatgttttagttgattgtggtgtgttcattaatggacaatccacaattgtgagtactgagtagtgtcaaggatgaacttccattgtgatatgcggttctctagcctcagtatttatttgaagttactgtgcatgcttctacttcatgctcctatagcaagttatcaagctgggtggttccattttcaattggcctatgacatgacacatgtactatatttggttccttctaggatatgtccaagcttgattgccaacttatgtttgccatgtcttcatgaactatgcctctttcatgaattaaatttctccaaaaaatgcctgctaaatgtcagcttgcaatcttggacaggtgttgttaataatggacatttggatgtgctcactgaaaacccacatgctacagaaaactttcagacaaatcatcatggttctgagtgggttgagctatttgttagagagatgatgagtgcatcagacatagatgatgcgcgggctcgtgcctcaagagccctggaggcattggagaaatccataatggagcgagcaggaactgaagcagtgcataatttgcacaaggtgcaaccaacagcatatgcacgtttcatccatagtacttgtactcctaggcaaattaagcagttatgctttgctttcctgcaggaaaatgtgatgctgaaggagcaactggcaatatatctgagagagaacgctgttctgaagagggcggttgctatccaacatgaacgtcaaaaagagtttgacgagaggactcaggaggttcatagcctgaaacaactggttttgcagtatcaggaacagataaaaactcttgaggtactactccttactcctggtgattcttttgtcccgaacactactcccggtgattttgattgttcttacataagtatatttaacattgcagataaataattatgcacttagagtgcatctgaagcaagctcagcagaacaattctatgcctgggcgtttccctcctgatgtcttttaacagatcttgagggcaatattccctctcatagtcttatactcaatcataccaagatatcatatgatgcaaggggttgacctattgctcatggtgtggttagacacttagactattcacccttacgtccaaatcataaacaagcaacgatcctcaaaatggagaaaggcaagcaacggtgaagcatcaattgaggtgtagattaatgtgtgcaccaggaagcttgagtgcttgacccttctctcagaccattgattgtatgtaaagtatggtgagatgtattgtagcatgtaattcaaagtatgaaaggacctgttcactgtattgtagtagcatgtaatacaatttatacaaagcatgagaggatctgttcattgtatcgtacgtatccactgatatatttattccgataaaagaatgcttatcagatgaaagtttccattgttccgtacttttaaaaatttatatcaatatttttatccaaatttcttcttggagaattatgtggagcatgaatatgcctgtctttagttttcacggttttgatttctgaatgcctggtgattacagaaccagagtatgactctatgggatacctgcaccaatatcctgcacgatgactgagcagtttaggactaatgccaattgctatcgacattgcaaggtgcataacattgatcctgcttctggacctcgccttctctgatagtctgattctctctcttatgcatgtgacatgtgacgaacacaaacaaacatgaacacataaaccattttatttagcacttaatccattcgatccaaccaggttacattttcacataattaaggctaggtagtagatgcggtgcacggctaggtgccaccattgccgctcgaggcagctcccggcggcacacggacgaccggacgcaggtagaggtcgttcttcgggcgaacgacgacgcctgtctcctcggccatatccacctcccctggagcaactccgcaggggagctcccagtcaaagtggtacagcaaagcggcgagcgcgagctccaagatggcatgtgtgaacgccggaccagggcagatctttcgtctagatccaaacggtatgtactcgaaatcggtgcctctaaagttatacttgttattctcacacctatctggtttgaacgtctccgtgtcatcccagtaattggggtctctgccaatcgcccacgcgttgatgagcacgttagtgcccctgggcacgtcgtaccctagcaccttgcacgactccccacactcccttgggacaagcattggtgcggcggggtgcagtcttagggtttccttgatgacgagctttaagtaggttaggccaactaggtcatcttcggtcacacttggcttcccttgaagcttgttacgtagctcggcttgtgccttttgcattattcttgggttcctcaccacctcggacatagcccattggagtgttgctgttgatgtctccgtcccagcagcaaaaagatcctaataagagatgtcagataaattaatcaacattacatatatgtagcagtaacaatgaagtatcacaatgatgaaatgaaagacaattaattaataagtagagtgaagagagaaaccatggtgcttacaagtatggtgtccttgacatctcccatggtgagcggggcatcgtgacctccttccttctgtatccgaagcagcacgtccaagatgtcctcgtcggcgtccatggcggccttcctctcctggtgatgcctgatggcgcagtccatgagctcgaacatcttccggtggctcgctgcggcgcggcgcgccgtgccgctgacgaggctggccagcctcgacgacgggaacaggtcgccgaggctgagcccgagcaggagcttccccacctcggccacgccctccaggtactcgtcccgcatctcgaacctgtcgccgatcatggcgcgcacgtcgtgtccgtgaccagcacggcggcgcgctcgctcacgttcacgacggcgtcggccccggccgcggccgcggcggcgacggcggcgaggaggcgcgccacctcctcctccctgacgcggcggaacgaccgcacgcgccgcgggccgagcagctcgaggacgcagatcttgcgcaggcgccagtgcgcgccgtggcgcgcgaacgcgaggccctcgccgtcggccatcatgacgcgcagggtggggctccacggccgcgacgcgaagttggcgtcctgcgccctgaggacctcgcgcgcggcgtcgggcgacgaggccaccacgaaagggacctcgccgagcctgaggtacatgagcggcgcgccgtgccggcgcgcgaggtcggccatggcgcggtgcacgtggggcttgcccatcaggtggtgcaggctcccgatgaccggcagccgccacggccccggcggaagcctcggccggccggcgccattgccgcgcgcccgcctcgccaccctgagcagcaggagaggggccacgacgagagccaagaagatgctcaggtactcggcgacatcttgcgccatgggcgccatggccgtgcaagctaggtgttcgatcactttaaggccaagctggagtgtagaatttgtacttcatataaagaagctgaaacaatgccaaaaaaaagaacgaaaaaacaaacatacaatgcagtttttgatgctgaagccagcaatttccactatcagtggagtgagatcattacttggattaatcacccaaatctgctggatatgcattatctagaaatgcatcagcagatcagaagagacaattcaaggttgtactattgctgtcaccagcttcagttacaagtgcagcatccaagcttttctttttcttttctttttttttgaattagcatccagctttcgatcgtcatcaacacctgcaatttcagctctagccatttcacggccggcccaaaacggaggcaaaatggcccacgtgggcccaaaagagcagcccatttttccttgggcccaaagaagggcccggttgcgttctgtgggccccggagaaggtcacgatgtggcccacagatttgtgttcagccgtgaacaataatgctcacggtctttccactgaattcagtagtcaactttacagctgtcatgtcaccagagtgtgctgatcaagtaatttactttatccgtcccaaaacataagatacattattataattattatattagacacgtcctaatacgataaatttgaacagacgtgctcagatttgtttctattcgattctatctttatattttagttatattatgtatagattttagaacagaggtagtacattttttttgtccgatacaaataatgacattactcatggtattattgcctactttaatcactccaactgaatgcattagcttgcagggcatcatgaacagacaattcaagaattctactaccgctgccatcagcttcggtagttcagttacaaagtgcaacagtaatcttccaggttgtctttgtcatcaatggcagcattttcggttacatgctgcatcatactgggatgctaccgcgttctcgttctaaaatattaaaatattgctatttagaatgaaatttgactcatcctataataacgaatctgagcagaggtctcttcaaattctatattctaagatgagtcaaatcccatcctaaatagctatattttacgacggtagtagatggctagttgtctcagtagtgtttccccaaagatcatatgaagttgtacaagtagggcctgattggtacagctccaacccctaaatttaactctaggagttgagtctggagtggagttgtggagctgcctaaacccagctccacaactctagtacattttgtgagagagctccacctaactctactcccaattttagtggagctgaaactgtttggctgagctccagctccaggagaggtggagctggagctggagctgtgccaaacaggcccgtagtatatcacaatgtgaactatatagtaggagcataatttatctcaaattatcaatcaaagattcatctgcgaacatgtttttcttagataatggaaggaacaatattcctttatctcaatgttccataacatatttgtgtgcgaaaaaacaactacatactagggtgtcgtcgcatggagtggcacacgaacgacggcatgtaggtataggtcattcttcctcctaacagtgatgcccatctcctcggtcatatctagctcacttggcttcaccccagcagggaggctccaatcgaagtggtagagaagggtggcgagcgcgagttctatgttcggctgcgcgaacattataccaggacacattctccgtccagacccaaatggcaagaactcaaagtccaaacccttaaagtcaatcttgctatcctcaaatcgctcaggcttgaactcttcggggtcatcccaatacttaggatctctaccaattgcccaagcgttaacaagcacagtggtaccttttggcacatcatatccaaagatcttgcatgactccctcgactccctaggaaggagcaaaggcgctggcagatgcaacctcagcgtctctttgataatgagctttaggtaatttaggtcggtcaagtcttcctcggtcacctttggcttcccttggagattgtcgcgtaactcagcttgcgctctcttcatcactcttgggttcctcatgagctccgacatggcccattggattgtagtcgctgatgtctcacttccggcgctaaaaaggtcctatgaaatttcaaaattattaacttaaattgaacatgccagaaattaaatgaattagaacgtacgaaaaggatttggaaagaaaattagaaaaaaacatttggttggaatttggaaatgatgttgtgcttgcttacaaggattactgctttgatgatccccatggtgagaggcacgtcgaggccacctcccttctgaatcctcaagaggacgtccaccagatcgtcgtcttccacgacgtcgccgctcgccgccgctgccgccgcgcgccgctcctggtgctgctcgatggcgcggtccatgagctcgaagttcttgcggtggttctcctgcgcccgccgcgccgcgccggtgacgaagctggcgagccacgacgacgggaacaggtcggcgaggctgaacccggagacgagcttgagcccctcggcgagggcctccaagaactcgtcccgcttcttgaacctgtccccgatcatggcgcgcaccgccgagtcggcgatgagcacggcgatccgctcgctgacgttgacggccgcctcgccgtggggcgccgccgccgcgacggcggcggcgaggcgcgcggcctcctcctccctgacgcggcggaacgactggacgcggcgcgcggagaggagctccaggatggcgatgcggcggagctgtcgccacagcgcgccgtagggcgcgaacacgaggccctccccgtcggccgtcatgatcctcacggtggggctcaccggccgcgtcgcgaacgcgacgtcgtgcgtccgcatcacctcgcgcgcggcgcccggcgacgtggccaccaccacggggacctcgccgagccggaggtacatgagcggcgcgtccatccgccgcgcgaggtccgccagcgcgcggtgcaccagcggcttcccggcgaggtggtgcaggctgccgatcaccggcagccgccacggccccggcggcagcctgacgccatcgctgccgccgccgcgcgtcctcgtgacccggacgagcaccagcacggccacggcgagggcgaggtagtggtagtaaccgtagcagctggttggttcttccatctcttcgctttgcttcgctgactatacgcagccaaagcagtatatttatacactacctgcgtatgtatacagctgtatgtatttatatctataccatagatagagatatggtatttctattcatatcttaattaccttatatctaacatctatattcatagcactctgaggaagcttctacactaacttggaaaaaatctgaccattaatttagcagatcacattgttatgatacagattgagaatacatttacactaaattaattagacactataaaagagttctttacattaactaaaaaaatctcactattaattgagcggatcttattattatgatactaccaagaatcgttgtgtactaactagggacttcgagagagcttctacattaaaaaaagatttcatcgttagttaaaacaaattgttcttaagtctattttctcaacttcacctctcttctttttcacgcacattctttccaaactactaaataaaaatttctatagtaaaattgttttaaaaattataagaatccattctaaatccttttctaatagttaatcaattatatgctaatacgtgcttcattttacgtgttggagaggagatgtcccctctcctcccgaacacattctaatgatctttactttaagtatgagggagttgctatatctctactacttaaatcatccttctccacctccacctccacctctacgtaaaaacctactaccataaaaaccatccatctaaaaagcagacttcttaaaaaaaaagctaaataaccccactaagtctaaattctctcggtaaatttaataaaaaatcgttgaaatgcatgagcctataactactactccctctatttcagattataagatgttttaaagtcaaaatgtttcaagtttaaccaattttatagaaaaaaatagtaatatttttcgacccaagataaatttattataaaactatatttaattattaatttaataaaactaatttggtaatgtaaatattactatatttgtctataaaatgagtaaaacttgaagtagtttgactttgaccaaagccaaaacatcttataacctaaaatggagagagtactaattaactaaattctgatcatctattaggcgaaacatgttactctctccatattttaatgtatgacgccgttgacttttcgactaacgtttgaccattcgttttattcaaaatttttgtacgaatataaaaatatttaaatcatgcttaaagaacatttgatgataaatcaagtcacattaaaataaataataattacatattttttttttgaataagacgaatggtcaaacgttacataaaaagtcaatgttgtcatacattaaaatacggatgtagtatttcgatatagattttattgagaattcatattaaataaagaatgaagttgaaaatagtttaattaggctcttttttttgaactcaaaattaattattacaaatataaggctgtactatatttgcactaccaacttattacattaccattttatcctaaaataaaaaaaacaaaatattaattttctttagtgggagatatagtttttcattccacacacccctctcgttccttacctgccatcttaaactacgtatatatatagccggcagggcaggtccctaattaaggagtagtacaaacttagtcattgttaatctcgacggaggacaagatccttcctgtagcatagagtagcaacgcacgcgcgtacagccaaaaccggccggccgccaggtcgccgtccacacgtcctcgcgtcgccggccggccggttgctggtcgggtggctgtcgatcgatgcatcgatctagccgtaaactgcccaatgcgtcgcatgtactccccctctttaaaaaaaaaaaaaaacaaaccctaggtgttttcgtgtccaactttgattgtccgtcttatataattttttttataattcgtatttttattgttgttagatgataaaacacgattaatattttatgcgtgacttgtctttttaatttttttcataatttttcaaataagacgaacggttaaaagttggacacggaaaccagggtttgtcttttttttttttttgacggagggagtagatgcacgcgtcgcatcatatccgccgcggtagcgtgcgatgcctccaacctgcacacgtcccgtacgtctcgatctgcatctacctgattcttcggatgattctctacagtagttcagaacaattcttgtaacgatgaggaatatggtaagagcctgaggtgagactggagtcggaggggttaggagtaaagacgaaaagaagattgagcaggaagtgattgatcagacggtgcgcaaacgcagaaactttctgtactatatattggttgtgttgtctctatttgtttatgtggctacaactagatatggtggaagagatgtcctttaaatatttttaaaaagaaattataaatttgttagagattaaaaacgatacattggggttgaaaccatacgtcctttactattgtgctatcaattacatctctttattttttagctgttgcttgtaatttcatctggttttgcactgtcatgtatcaatctaattgggcatacaatctattatatattaaaagtccatcaaacattttcaggaatgctcttaaatcatcacattatgctaataaattagagaaaatcttaagaattttaagaaaaaaaaattcaaccgttaattttcacttagggctcattcgaaaggtagaattggaaaaaaaagtaggaacaaaaaatacatataaatgggataagattgtttgtgtaaaatagatgattgaaaatcataaaaaagtgatgttcggaacaaaggaattgctaataagcataaaaatctttctaagcaatcacattagttgcttgcattgttctcaaattataaatcgttagattagattgatcctaagaatagaacgcccaactaaacccagctacagatcggttggctgtgcacggctgcgatggaggcctggagaaggcgcccgatcgaggcacggaagagactccgggatactatcactctctccgtttctataatataagagattttggataaatgtaacacatcttagtacaatgaatctaaatatacggtacgtctaaatttattgtattagaatgtgtgacatccatctaaaatactttatattatgggatggggaatagtagctagctgtacgttgcctatatgcaaatccaaagactcgtccttccagtgaaacatgccactctatacatcaactgccctacagctttgcaaagtgcatgcaaacagtgtcctacagcttaatttgcgaagcgtaagaacagtcagcgacgatcatctggcctgccatacaaagctcgatcacccgtaaaccacggcctaatataaccacatcctggtaaaacaaaccacacaaacacaatgatcgatgaacaatgcgggcacatgatctcacctaacaactactgagattaaaaacgaataaattgatgaggaatagatatctaaggctcatgttgactacggtttttttttaaaaaaacattatagatcacatatatcatacaaaatgaggtctagaatatgtatatctcctccatctttactgattggtatgaaagtatacgacaaaccgcgtcaatgtaaaccaatttgaaggaaactagtttgattatacaaataaaatatatttattagcaacagtagtaaatccgtatatgtggattagtaaggacggtgaagacgtacatgggaaaaaattgtatggcaccccatgccacaaagcatgcatggcacctctatcaagatcttgtcacctagcgtgcacaaatcttgaagcactgatctaccttcaaaaccatactagggcaaaaactaattaacagactatcactaatctcgcgcgcgcggaaggatggcggcggcgatgcgcgtgacggcgatgcacgtgcaggaaacggacggcggcggtgacgacacgatgacgtgcgtgcaagaaagggcggccgccgccggcaacggcgacgcggacgcacgcagcaacacggcggaaatcgacggagctagcgctgcccagattgatcgcgcggcagaggtgcgtgggctgatcggtcataactcgaggtcaaacttcgctgacgatgccatgaaagacccaagccatgcacatcatcggttcagttcagatgatgagaatcttgaagattgcatgaatgaagaaaatgattcaggcctggtttagttctcaactttttcttcaaacttttaacttttccatcatatcgaaatttttctacacacataaacttttaacttttctatcacatcgttccaatttcaatcaaacttttaattttggtgtgaactaagcacaccctcagtgtgtgagtaattttgattgatgtactttgttgtgctcagtagatacggaatgcatacaaatttgtgtgcactgtacgtgcacgcgaccgccggaatccttccgcgcgcgagattagcgatagccagttaattagtttcatgcggttttgaaggtagaagtgctccaagatttgtgcacgccaggtgacagaatctcaataggtgtgccatacaatttttttttccgacgtacatatcctactagtctatcttctttttatatgatgacacagattttagataattaattgtttcttgaaatttactaaataatatactgcatagagctaacaaatagactgagaaaaaaatatctaaacctttataagtttcttaagtacatggcctatgttgtatgcctgcgtatttgtagggactacctttctagtttagtctaaaaattttgaacggttttttgaaagtagagatgaactccgaatctccgatggaaacaaatgcaaaccacgtgaaagttgacatgtcaagctgggaacatatcctatacacacaagtttctcgtgcacaatttaataatattattgaaaatatgtgtttaatttttctagaattttctgtgaaatttactagttggtgtgcacgagaagcttgtgtgcataggatatgttcccgtcaagctggtcagtcatttatgattctgagacccggtttgaaccaaacgaagtccttatactgaagcaattgactttgttgttctgagacccggttatgattctatttctacccatcgtattgtttcgtttgttgtgaaaggtaatttactcattaaagaaactgatagaatcataacgactagttcagtagttcgctttggatttaagcttctgaagtgctcgacagcttaccaacctcgacgccatggccatggtgaaacctgcactcgccgacgattatcgggtgaaagaaatctctgagcttgaaagaagagatgcggttcggttgggtcggtgattcttcaccgaccccaagaggcatttgggccgtatatgccacagcaattgggccgtcgcccaccggcccaccccatcaaaacagtactcggagaccgaaccgcagcaccaacatataacacactaataaatgggattttttttccatccttcgaagtacagtaacatataatgcggtagtggtaaaaggtaaagaacaatagcgattgcagaattggatgaacagattagttcatgaaaggtggaagcggaacgaccttggatcggagttgggacaggataattaactgacagcgaatctgcagttggacagtaaacaagtcttcagaatgatttgatttctgtctgtttctaccaaagagtttctgatgaatgagtagtcaattaacttaactacttttaattaaccatcatctgaagccatgagggtagctagctcagattctttactggacaattatgtaatgtattgctctctcgtttccttcttgattaatgatcaatcagttcatctcctctcttgaaatcggcctgtgctctcctgatgctccatgccattgttgaaggcgaacattcaggccctgccgccgccgctgccgaagctctccaccgccgacgaacggtcgatctgcaggcacgccggcgagtcaggtttcagagtagactgttcatttcacttcctacaagtgtttgtgttcatcgtgcagatgcagaatcactgattcatcactcaccagagttctcaaggagattctttttctcatttgcaaaggtcatattcaaagaagcctccatatatgctggtgtgtgtacagtcctggtctcaagtctcaacgatgatctgcacaaataaaaaaaggatgaacaatgttagacaattatactgtcacttttcacatttcagatatcttccttcttttatcagtgtttactgtcaaaggttagattgctacaaataacaccatttcacttttatcagtgcaatggaaatagggagttctcaagcatcaagaaaccggcgtgccatattagctacagtttctgtataaaaacgcatgaatactttgttgaggtaaaacgtaaaagtcgtttttaagtaagcatgtttcacaaaatggtgcactaagcactagtctgagttttgaactgctatttggtggtggctactttctcctgctccgttagtatgttttccaattgctactcccttgctaaatggtgcgttacgtacacaagttttactatatagaagttttttttttgaaaaaaatgaaataattgtactcaattaatcatgtctaatagtttgtcttgttttacacgttgccaaaaatcctagctgaatatctggttcgaactcagcgactgttctcatctaggacactatggaacaggtgaatcataaaacacaagaataagaaaaactaattagtttcatatatatgaatgcacctaaaaaacagagaagtgtaatatatatggaaaaaaatataggagtgatcgttaaaatcagaatacacacagaagtcaatgattttctagaatcaaattgccgccaatattagaagctatagtaaaattgctcatagtaaaagagacgtctgttgcctacgtcaagacagagtgattaatccacgtaatgaccttcttgttgccttgcattgacttactgccagagagattggaaaaaaatgcccccaagtgttatcagattattgtatgttgcgtaacacaaagaaactgagatgtacttgacagtgcaaggacaaaagatatgaggtttaagtgttatcaaattattgtatgttgcgtaacacaaagacactaagatatacttgatagtgcaagggacaaaacatgtgaggttttaaccttgtgatccattttcaaacctcaacaccctcacaattttcttttaaaaaaaaaactaccgctaacaaaaatactaggtgctgattggaacgcgcgtgctaccaaatagcctataattagttatatcaacaaaacaccgtaatggcctgacataattgataacgacaacggcgaagttatgaacgtactcacggtgaaaattggccaatttctggttaaattaattagtgcccgttggagagccgtccaaatcgcgctgacacttcccttttgtaattatccgcagtactatatgactagacaaaatctgctgccgatctatgctcctttaaagaatggaatggcttgtcaccagcatcaactccccaaaattctgacatgtgagactattgtccattccctcttaaaattaaatgtacggtaaaaacagaattaattgaaacaaatcaaaattgtttattgttggcgaggagaagcagaggagtggatggatggtgcggatcgatactcgatcataagctcgttgcggtcacaggctcgtctcggtagacgtcgctacgctacggcaccgctaatctcgactccgtgctattaagttaatcacatcgctaatctcaggagttgggtggggcccctataatcagaggcacggtccgacaaaaccgacatgccaagagcaagtataatagtaagctataagcctactataaacttatgtagaggagagaagtaaataaaagagaaagatgttggttctcatgtaagagctggcttaacacaagctccaaaacaacattaaatgtataagtgagagatagagatagaagaagaaaatcatagctaaccttatagttaatctattatatgtgttaactttagtataggctaatagtaggaaatgtgctatattattatccttgctctaaaacaacgaatctaaacaagtattgactatttagattgttgtttcaagaggatgtttgggagggaggacaccccctaaaattttataggtagtaatattttggatgaagttagtattctgcaggcacacctatatactcctgtcaagtcaacaccaagtagtcgaagctctcacgagttgccatgaaaaaaaagaagataatactcgaacaaccctcaccatgtgccattccaggtgacagcatggggcacatatttcgaacatcaggtatggcaccttaaataatactatctttatattttaatatatgacgccgttgactttttatttaatgtttgaccattcgtcttattcatcgtcaaatgttttttaagcacggcataaatattttcatatttgcacaaaaaaatttgaataaaataaatagtcaaacgttgattaaaaagtcaacgacgtcatacattaaaatacggatggagtaaaaatattagttcaacagtttcccttttgtcttgcaccgaaaaatagggagtagatttaacttaaaaaataggtagtttcccttttgtctcgagaacggtgatcgatatcccatcaatatatcagaattgttttctcaagaaatatattgctaaaaagaaaacttaatctgctcctactgaggcacaactacaagtctacaacttcaaatgggggtaatgcattgtggatggcaaggattggtttattaatttacacaaagttaagttttattttctttacaaaagaacttaattgatgttagagctataatagaaatagactgttttgaataaattaactgtcttatctatctgaataaattaaacaccttgtctactcgtccaatgtttgtcataattttttatttttcctgttgcaacgcacggtcacctctgacagattaacaataccaatttattcctagtaaaatcctaaataaaatatttttaaagcacataaaaatcaactagtagatatatatttgtaccattataataccaccaataatagaaggggtcgtagatgcaccccctacataaatagtagtaagacgtagtactgattaattcaagtaatgatattttcttctttgactataccagatattagagcttaatcagatgttgcgtgtgtttgggaaacacaacaatatatgaacttgaaaccttgataccgctgacattttttttgtgttcattgcaacacgtgtatgcatggtaagcacagcaatatactaattccccgagatagctgataacaactgcaaagttgacaattgaactcactgcgaaaattggcaattcaattttctagctgaaatagcgcctgcgttgcaggttggagagccgtccaaatcaatgacccagcgtcgcgtcggtcactctcgcaggataggatcctctctacacaacactccaaatagattattctaacagatgattccgttaaattttagcataatattgacgtgtctggttattcgtcttattaaaaagaattatataatcatattttattttattatcaattgttttattactaaaagaatattaagcatgaattatatattttttaaagtttttgaaatcaaattttgaataaaataaatggtcaacgttataccacaggtcaatttcccagtctattttaaaaacaaagatatagtattaatttgaaaaaatgtgttaaatgccaatctttccaaataagaggaccgcaagcaattagcagacatcaaaacctgactttaattcttagatgcattatcatactaaaataacttttctatgtatattattatagtaattaaacttctctatatataccattcctagttgcccttaaggtattcgacaactaagctactagctagctagctcaatacgccatcagcgacaccgtccaggttgttgtgagaggggttgtgagatatttaactatttatcactctaagtggcaatctggcactaattcagccatgaattaaaaaattgccaattttcaccgtgagttcagtagtcaactttgcagttatcgtgaaccatgcattaatgtgtttgaattgcaatttgcaatttgcaaaggtcagctttgtcatagatagccagaaattccggctgcctctgctgcatcacaattactacttcatccgtactaaaataaaatataagtaattttgaaccgatgagatacttttcagactatgaatctagacatagagtatatattgtatttctagaaagtgtctcatctgttcaaaatcttttatattttaagataaaggaagtatattgctgtgccagcatcatcagcatgggtgttgtgcttgttggagtgatcatacaggagttgcaaattgcaactcaaatcgttaacaatagtacagaaccattgcttaactgttctaaataacagcacatttactagctagtggatgcattccaatggattagtaaggacagacgcaatgtatcttgctggggtcaacagtagtgtaggccccaaatcaaatggtagttatcataaattgcatgatatgctatttttagagaaacaaattaaaccgtatctagttaatataaactcatttttatgtttgatatatttgttataacatgtagaagtggaaaacttgcatgttaatttgcatagtgatatatctcatatcaacttatcttatcatttttttatttacaactatttaggtgacatgaaaaaaacgagaagataaaaacacttttctgtagaattaagtcatcgaatatacgaatatgtttgagatagctaaatagataatatgttatgtatgggtggtctctgtatgttataagttgtaattaaaatgattatacagataatattcgtctaaatcacagtatttatgctctgaactcaactgcgaaaatttcatacaatcactattcatgctctgaactccacaacattcctaattaaaaggttgcatgtgcttgaatactaaaaaatcggcacccgatttttttacaactaagcacatataactaacggtagcgctaatccacgcgctgcacacggaatattagatcgagcgccacacagcgctccctccttccagttttttcgttttttaccacccacctttactccgcatcccacctttcatcagtttatttttttcgtttttttaccaccctatcttccgtggttcttttttctcttttccatcttatccgtgcttcatcaaagggcccggtaaaatattaaacatccagattttttttgtttttggttccttctctccagttattttgtttcgcgttttagtaaaatatttatcatctagtttttcttttccagttttctgtttttctagtgtctccccacgtttcaaaagtaacgaatttactccgtggagttttccatttactcctagccttccacatctgctccttctaaaataacaaatttactcgcatgaatgcccttactttttacttgcatgaatgtccccatatcgtgcgacaccattcctagatggtcgtaaaagaactactacctgcttaaaacactagtaattcttttactagtgttataaatattgtttagatttcgtggtctgcgagtaaaacaattaccaccttcctctcgatatagcccatgatctcgtagctactatgtagtaatatgtttactgatatgttcagtacactgtataagagtaaaagctgagacttcgtggtctgcgagtaaaacaattactacttttctctcgatatagctcatgatctcgtagcaaccatatagtaatatgtttactgatgtattcaatacacggtataagagtaaaaaatgatactaaaagtattgttaatctatatcacaaaatgaccgtacgaataaaaaaaattacaggctcaatcacatacaaatgataaaaattactcacaagtgaatcaaactagaaaagaaaaaaaatgattcaaccaaaaatccatcgtgaaactaggattctggtggctttcttggatcttgctataaggatggagatgccggtctgtgtcttgtgacaggtagtggagagggcaaccagatggcgagcggtagtcgatgatggaataatagaagggtgtagcggcatggtatagagatgggctcgacattgcgcagtagcagccatccatcatctagcaagcacgaaaaaaatgcaagaacattctcgttcatgttatagagacgacgagcaaaagaaaaatagcaaaaaacctccatcatcggcaaactccaccctatcctctgcggcgaaccacatggagcatgatgtgcaaatgtaggacctatgcagcccatcaattcagatcaagtaatattggagattgcacgttaatctgatttgcaaaaaaaaattggggcttcatgcgtgaaggtaaactagagtatgcagatgcaaatcggagtgctatttccttacgtgcttgttctgtcaatgtcgccgacgtggagcagccgccgattgttgctcttgacctaggtgaacgcctctttactagttaaggtgttgctcgacgtacggcagcgaggcccgaagcagcgccttcgcatcaaccgccaccggccaccgctcgccggccatcgcctgtcgtcgtcctcctccatggtgcgtcaccgatctgtgggctgggatgatggatcgatgcatatcccaaaaaaaaagaggaaaaaataaagtgggggcgagagtggttggttgggtacgggaaaaatagaatatatactggaatctgggaagttgtttttatcgaagtaaatcatttactccgataatagtgggagcaggatgatgggacgtggggtgggatcggaagtaggaaagttgtttttattatcgaagtaaatcatttactccgataacgatgggagcgatgggagcgggatgacaggacgtggagtgaggtaggcttagactaatacatgtttggtgctcgaaatgctaaggaacgtgctgcgctcctaacagcagtactacatatttaacaccgtatttcaaaatgcaagcacgccaaacacatgtttaactttgttggcaggatgctccttgagtggtgattctattgaactgttgtgaacaaactaattattggatgctgaattgatgagtacatacgtatacgtatacgtatataccaacaacctacctcagtacctctaattggcccgttggcttttgtttcagaaatcagaacaacattttctctacatttcaaatctaattcatcagtaaggatcatcaaaatcataatttgtgctaattagtaattttcatttgttttgcatagtagtgccgcatatcgatcagcttttacaaatcattgtgacatatacatttttcagtgtagtataaatatagtaaggcaactacacgattgctattggccagcaaataagagagttttttctcttttttttaataatggtatgaaacatcccggcctttgctcacaagagctatagtccattattacaaaagtagcacactaaaaagcttagtccaaagagttataaggctgatgattcctgcacgttaatgctaataagaaggcagcggaaatcacaccacagccaagctgtattaatgtccaaacctccaaatcgctttgcgcctttcaatttgcaattatttctcttgcctatgttttcattttgcaattatttttgtgctagacaacaaataataaatgaatcaacttctgtctatttataccatttccatgaagtgctcgacaactcacacccatggccatggtgcaatacgtcaccggctacctgtgcctctccttggctctcctcttgctcactctcgtcctccacaaggtggcgaggaaggcgaccggtaatggcgccggcaagccgaggcttccgccggggccgtggcggctgccggtcatcggcaacctccaccaggtcgcgatgggcggcccgctcgtccaccgcaccatggccgacctggcgcgccggcacgacgcgccgctcatgtcgctcaggctcggcgagcttcgcgtcgtcgtcgcctcgtccgccgacgctgccagggagatcaccaagacgcacgacgtcgcgttcgcgacgcggccgtggagctccaccatccgcgtcatgatgagcgacggcgtcgggctggtgttcgcgccctacggcgcgctgtggcggcagctccgcaagatcgccgtggtggagctcctcagcgcgcgccgcgtccagtcgttccgccgcatccgggaggacgaggtctgccgcctcgtcgccgccgtcgccgcggcgcagcccggcgaggccgtgaacgtcagcgagcggatcacggcgctcatctccgactcggcggtgcgcaccatcatgggcgacaggttcgagaagcgggacgaattcctggagggtctcgccgagggggacaggatagcctccgggttcagcctcggcgacctgttcccgtcgtcgaggctggccagcttcgtcggcggcacgacgcggcgggcggaggcgaaccaccgcaagaacttcgggctgatagagtgcgctctcaggcagcacgaggagcggagggccgccggcgccgtggacgacgacgaggacctcgtcgatgtgcttctcagggttcagaaggaagggagcctccaagtgcccctcaccatgggcaatatcaaagccgttatccttgtaagttgacaagtacttgttcttcacctcttccccttttcccctgcgaaatcactaatacgcgatcggtcgctgaaatctcggcgaggccatcggttttttttcttgccgttacctttccatttttgccagactcctgtgctcgagatctttgttttttccgtcgcttttttggctgttttttttctgttaccgaatggtgacgcgcggcgatcagcccgttccccatgatcctttttttttttcactcgcattacttttctgtttttagtaagtttatataactaaaggtggtacacatcaaatttacacaactaaaatttatatacccaaagtttatacattccaaagtttataggttaaaagtttatatacccggttcaaatttgaattcaaatttggattcaaatatatttatatatatatatatatataatatttctatacataaagtctatatgtacggaatttcatcaagtttatacatctaaagtttgtatacccaaagtttataagttaaaagtttaaatagcctgttcaaattaatttggattcaaatatttttttatatagaatatttctatacataaagtttatatgtatgaaatttcatcaggtttacacatctaaagtttgtatacccaaagtttataggttaaaagtttatatacccggttcaaattcgaattcgaatttgtaagtataaagtttattcacatgaatatatttttcaagtgtattagatttctttttatattttttaaatggtttaaaattgatagtgtggtagaaaggggagacgtgtgcggggagggacgcgggtgctgatagtttttttttatcgcttaaccctccctccagcgagcgatcgcgtactaggaccatccttttccctatggataatgataatagtattatctcccttaattttgataggacttattttattcaattttaacatcttcgacaccaaagctttaacttttaattggttgcaaaatagtacaaccttaataactactccatctgttcacaaatacagataattttaagcccttttgacttgtccaaaaatattaatgagtttaaagtactttttgtcttatcaatcatttatttttcaatcgtatcaccaatcactttctggatctataatccctatattcgtgaacggatggaatataagacatattttaccaaaccccttttacctgagtgcacttaaaattttactactgttaatgtaaaaatctataaagttttacctttaataataaaattaaataaccttaactgatgaatgggggagcatatgaaaataaaaaaaaaggtatgcacactgaacaaagaaagtaattgataagatattgttttttacgtatatgggaaatcatgttttttccatgcatataggaactttttggtgctgggagcgagacatcagcaagtacacttcattgggcgatgactgagctcataatgaatccaaaagtgatgctgaaggcacaagatgagttaagtaacgtcatcaaaggaaagcaaacaatatctgaagatgacttagttgaactgaggtacttaaaacttgttatcaaagagaccttaaggttacatcctgtggtgccactacttctccctagggaatgtcgggagacatgtgaggtcatggggtacgatatccccataggtactactatgcttgttaacgtgtgggcaatcggtagagaccctaagtattgggaggacgctgagacatttagacccgagcgatttgaggatggacatatagacttcaaaggaacagattttgaatttataccgtttggagctgggcgaaggatgtgccctggtatggcatttgcagaagcaatcatggagctcgttctagcctcgcttctctatcactttgattgggagcttcctgatgggatctcgccgaccaaggtggacatgatggaggagttgggtgcaactattcgaaaaaagaatgatctttatctcgttccaactgttcgtgtgcctatgtcgactgccctatagctgtttacacttaagagacaaaatatttgtctcatctgtacgcgcctatatgataaactatataacttttgatggattgatgtactcctactttgcatcctactcgttctacattattactttaaatttagttattaaactatttaatttatatatatgatcaagagtttaactcgtgacaataatttgataaataatatgttttaaatgctaaagtcctcctagcttgtcaattttgatggcggtcacctcattacacatatacatgtacttgcacgcacaatatctggtgtagactctgggatgccataaccatgaacaatatggagaaaggaggataatagtcgtgcctcctattgctggcagtagctctgctaacacacaatggcgttgtgtgaagagaagaggataagaggcgggttggagcctgagagttggaagggatgaggtggagaggggtgggacaaacatgagaaaagaggacttataattttgttttaaatttggtcaaatttaagaattttgactaaaaaaagttgaatgccttgtaatataaaacggagggagtaactattattaacagataaaattgtgtatagttgtattagtgccggtacgaaagtagtcgcgctgtccctctcattttgcaataatttctcttgcctatcttttcaaaatagggatagccgcactgtacctgactttttttttcacttacatgaatgaatgaacttctctatggaaactagtattttgatatctcgagcggatgtccacttgtctatttataaaccatccaaacaacaaagaaaaattctcaaatcgtctacactaacagcgtaaattttttaaatcattattcacacccaaatttattttttattctaaatgtgtaggtcgaatttaaacttagatttccgtcgctgatatatatccctatactaacattgttaatgtttttcagatttttcactaccatttacattggatttggaagaaaaaaaagtaacgaggggacatcccttaaagaagttagaatccactccattctttctctatatataacatttcttgttggcctccatatataacactcatagatcgccatggccgtggtgcaaatgcaagacgtcaccggctacgtttgcctctccctggctctcgtcctgctcactctcgtgctccacaaggtggtggcgatcgaggaaggcgagcggttgtagtggcgccggccagccgaggcttccgccggggccgtggcggctgccggtcaacgatcggcaacttccaccagctcatgatgggcacctgtggaccctcgtttttataacaggaatcaatcgtgtaaacagtaccatttctctgaatcaagtagtctggtacacatgagctcatagctgaaataccaaatactcatacacgagagtctagtgtgaattattacaacataagcccgcaggcattgtcttaaatcatcggaccgagcggtccggaatacaaccaaaagcagaattagataagacagcggattttaggcagcggcatgccattgccacaggcaacgaccgtactaagacctactgggcgacatcgtcttcatctccctcctggtagtaggcatagggatcctccggagcttcgtctcccgcttctgattaattttatattcgcaagggtgagtaccaaccgtactcagcaagccaccacagcaacaatgcatatgaaagggtatttcaaaggatagctatggttcttttgcgcaaagcaagttttgtaattctttttacaagcctcagacctagcattgactgatcaaattttagtaccagtgtttgtatttaaacaacgatggttctgtccaccatccattgtgatcccaaggatagcttcccgccattgagttgttatggttttctgaggatgcccaccttcccccttctcaggaagtggctccaacagcataaaaattcgtcatgcaacaacccatcccacacaagttaagaatttagagactagccaagtgtaatacatgtcccgatgctcaataaccgcgagcacgactattcgaatagatttggtttactcacacttcagtggatgtacactttacccgcactccgcgactgcccaacacatgagcctcgtcccaacacatgagacgtgtcacggcaaagcttttcgataacctcgcattggcagtacccgctccatgaactttatatcctcatgcactctaggcgtacacgatttctagcagtgagaggagttctggcgcacccgggaaaggaaaaacacatgcactcctacgttgcttcctgtcgttgtacccagtccatcatgattgttctcttatgggtatcctcatgtagtattgccaagccagtctctgaccatccggaacgggcatccaccatccacctggccatctgaaccgggcatccgccagcagactgcttgccgcatcacacacctaaaagaagaccactacgcatggatactgcctccgctcagctatctactccgctaggtctatacccatatgagaagtgcggttgtacgggggatcgtttcattcttaacttcatggctcggtccttaactgaccagggacggcactagccttttccggacatcacccaaatcctccatccgccccagtcgaaaacatttgtttagttttattttcctttcacaaattatgtcatcaatatcatggcaatgtggcgctcatgtctccacatgccgcatctcaattaccttcccaaaggtaattgcccaagcatatagcatttgataaatatgagtatgcataaatctagagtagcatttctaagcatttgtcatagttgactaaggacttatacgtaaatcatagttacaaggatttaagggtaaacaataatcaaggcatggcataatcacaagtaggatgttcataactgcatgcaattttatttgtaaacaaaacaatttcgcaattgggattaatatgttcaaggaatagtgatgacttgccttgctctaggtcttgtgggccttggccttcacccggatccgcggctccctcggtctctatagttacatgcgtaagaacaatttgaattcgatcagaattcaaacaaaatccacataatgaccgtattgaaaaacgagcgcgggaggtgaattttatataggctactttattcgcgaagtggaattgttcttcttcctaagatattttgtaagttatagtcatgtcctaagactcatcgaattattgagttcttaatcatatgtaaattattatcgcgaacttgatttcttagggagattactaaaaataatctatagattataatctataggagttcatccaattatattttcattaatcctataattaaatgctagtattttaggtatttaattagtaagaattcatctaactatattttcattaatcctataattaactttcgcaattttacgactataattaacctacgattaaattcttaactattttgaattttctaaacttctaaattttactcaaaccctatttattttctttctcttcctttccttttctttttccccttttttttcttctttcccttctcttttcttttctctctttttcctctcctctctttctttttctctctcttctctcctcccggctcctttctttcttttccttctcttcctctcttctctttcggctccttctccctctctctctcgccctgcctaccgagaccggctgaggaaaaggaaaaaggcggcggcggcacggcttaccggcggcaacggcaatggtggcggcgcacggtggctgcgacggcggtggcgcacggcggctgcgacggcggcggggaacgcggcacggccaaggcgcggcgcggcgcggcggcttcgtggcggcggcgtggcggctctatgcgacgacgcggcggcgtggaggcggcggcgcggcggcgtggaggcggcggcgtggtggagtgggtagaggagaggaggtgaggatggagggaaagagtgggaatagtggagtttatataggagaggggaagagataagggggagaggggagaggggagacgcgacggcggcgcggggcgcgaggtgggggcgcgcggcgcgaggcgacgcgacggctgcgtggcgcgagcgacgcgacgggcgagcggcagcggcggcgcgcggcgcggcgcggggcgcatggcgacgcgacagcgacggcgacgtgcgagcgatggcgacggcgcgcggcgatgcgacggcgatggcgacggcgcgcggcgcggggcgcgagacgacgggacggcgcggcaggcgtacggcgcggcggggcgcgagatggcgacgtgacgggcgagcggcgacggcgacggccgacggcgacagcggtagcggcggtgcgcggcgtgaggtgtggggcgcgggcgcggcgtcggcgcggcagcggggcagggttaggctagggaacctcgtcgaacacctggcggccgatgaatagtgccgttttctatttaacccgatttaagcctattcatttatttaaaattgattctataaacctaaattttgtacaaatgaagttcactcaatatttgtgttattccaaccaatgggtccatccttgattaattttacctatattttatttttatataattttcttgaatttaattagagttaattcttattccgacacttttaaatttaattgatacaaatatagtcgtaataatattttactcatttctatcctcaccaaatattattttaaattgcactttaattatttacttagtcaatttactttttagggtttattcctaactaattatccattattcgcgatttataaactctgaaatcaaaatctaataaaataatcgaacaaaatcggcatgatgcaattttatttaaaaagtttttgaaggcccatatttttgaaactttgatttttgttcgtcgaattttcagggtgttacagcaccatggccgacctggcacgccggctggacatacgcgccgctgatgtcactcaggctcaatcggcgaactccgcgtcgcgcgtcgtcgcctcgtccaccgacgccgcctgcagggagttcaccaagacgcacgacgtcaagttcgcgacgcggccgtggagctccaccgtccgggtcttgatggccgacgggttgggggctgattggggctagtgttcgcgccctacggcgcgctgtggcggcagctccgcaagatcgccatggtggagctgctcagcgcgcgccgcgtccagtctcatcgtcgctatcgccggcgcggcgacgcagcccgtgaacgtcgtcagcgagcggatcgcggtgttcatctcagactgcgcaccatcatgggtgacccggttcaatgcaagctagggccaaggatcacataagattgtgatatgacaccaaaacatactaatttttcacatgaatgtagattaaattatcatttacctactatcttgttatatagaacataaaaataaaacgtacatctatactcgtgagaagctcgagctcggctcgacaaatctcacgagtttggggctggacttaggctcggctcgttaagagctcgagctgagctcgaatcgagtctgagacgagccgagctcgaatcgagtctgagtcgagccgaactcgagcttttttgaaagctctaccaaagcctggaggtaagaagggatgaaggaaggggaggagagggaacaggagaaaagaggctcgctattcagcaatcatagtgaaatttgatcgattttatgaatatgaacttggaacatggaatttggaattttggcttggttctaggttttagtgtagtgtggacaattcagctctggaccatgctagtttggcagttttgacaccgaaaaatttatgtttcaagcatgactaacagaatttggagttttttttttttgaagtgagtatattggcaaaactcccatactcttgaagacttatttctccacctcgtgcaataattcaaaagcaagtgaatatgtagtgtaaatcacttatgtctgaaaatctccacacacatacagttatactatatatgtttccaagctcatatctttctacggatcactctcaatgggtcaaatcggcttacaattacgtacttggcctagtttagcccaatgtatttagaattatcctttttatgtgcttctcgctggtgaagacacgtcctgctgcaatttgttcttcatcagcgacaccgtacgtccaggttgttgtgagatatttaactatttatcactctaactggcaatctggcactaattcagccatgaattaaaaaattgccaattttcaccgtgagttcagtagtcagctttgcagttaaagcgagccatacattaagtattgcattaatggtttgacttgaagtttgcaattttcaaaggtcagctttgtcatagatagccaaaaattccagctgcctctgctgcataataattactactacgaccgtactaaaatataagtatttttgaacggatgagatactttctagactatgaatctagatagatagtatattgatgtcctgaaagttgtctcatctgtttaaaatcttttatattttgagacaaagaaggtatattgctgtgctatcgtcatcagcatgggtgttgtgcttgttggagtgatcatacgggagttgcaaattgcaactcaaatcgctaacaatagtacataaccattggttaactgttctaaataacagcacatttactagctagcggatgcattcactggtggagaaaccgtctttggtcggtcgcccgaaatccacaatagtctcggttccactaaaaaccgggactaaaaatgatctttagtcccggttggtggctacaacgggtatatttgatctttagtcccggttggtgttaccaaccgggactaaaaatgatctttagtcccggttctaaatctgtcaggccttgtcatctttagtcccggttggaagctttactcgcggttggagttaccaaccgggactaaagatgtatttttagtcctggttggtaataccaaccgggagtaaagattcccatgctatccccgcctttaagtcccctttttttctctcctctttaagtctctcggtatccgcctccagcgcctcctcgatatccccttcctcccctggcccttccccttcctccttcccctctctgctccccttttctatccccgcctcctcctcctccttcccctctctactgcggccgggcggcggcgacggaacgaggtggcggcgacggagcaaggcgactgcgcggcggcggctggtggggccgcggctgtgcggcgacggtggagcgaggcggccgcgcggcggcggcggagcgaggcggccgcgcggcaggcggccgtgcggcggcagcggagcgaggcggccgtgggcggcggtaggtggggccgcggccgtgcggcggccgcgcggcaggcggccatgcgacggcggccgatggggccgcggccggcggccggcgacagcggcagtcaacattgtttttttatttgtgattcactgtgatgtacttttgtatggacaatattgtgattcattgtacatttgtatggatctgtgatgtataagatttgtgatgttactttggtttgggtttgatttgggtatttggggtttgatttgggatatgtatcccacttgattcgagagaaaataaaaaagaaaaaaaagaaaaggaccatctcaccgccgctacctctctttggtctcggttggtgttaccaaccgggactaaagatcccctctctttagtcccggttggtaacaccaaccgggactaaagatcgatctttagtcccgggcatttgaaccgggactaaagataacgatctttagtcccggattggtagtcccggtttaaaaaccgggactacaggggggttacgaaccgggactaaaaagcacttctccaccagtgattccaatggattagtaaggacagatgcaatttatcttgctggggtcaacagtagtgtaggccgcagatcaaatggcagtagttatcataaattgcatgatactgtatgttatttttacggaaacaaattaaactgaatttatttaacataaactcacatttatgttattatatactaaaagtccattaaacttccttctgccacgtggcgctatgataaattaaagaaaatcctagaaattctaaaaaaaaacaaaacatctaccccttcattttcacttaaattggtgggtccaatattatacaccgttagataaaattgatcttaaaacaaacaaaatactatgggtcccacctctcctctttatacgtgcataggtaggtcacgtacgggtatgtagtacgtacgcctccctcccttttgtttcctttttttactacttttttccatttatacaattgataattttataaacaaagaatataccattatataactctttataaacacaggtaactaaattagctctataatatttgaaaataaaatttacaccatattatatgtttacccattaaatcaataatgtaagatagtttccacttaaaccggtgtactaattactttgtactattatttttaaataatgcactattttaaaataaaatttacacaattatattgtgtacctatcaaataaacaatttaagatctatattaactaatatatacatgcacttaaacagatagacccattatttaaatcattggatctatttttataattactttggactattattctcaaataatacattgttttaaaataaagtttacaccgttatattgtgtacccattaaattaacaatttaaaatatagattaactaatttatatttatactagaacaagtacgacccattatttaaatcatcggatctattattaataactaaagtgtctaaagttctctttttggcctgctgcataatgcacgtctacaccttttcctttcgcatgtgtgacaaagcgtcatgtctgaggcatctcaggtgatcatgaccgctgcagcgctaccgattttgttaataacatgaaaagaaaattaaatgtgtgatgcagtgagagaagaattaagcaccgtgttaacacttagctctgtttaagccgaaatcgatagttgattacataataattataatgtattgtgttatgttgtattcagattttgtattatttgtttgtacaattgaaagaaatcattatgttacaaatgtgagcacaatattaacgaatatcaatagaactcttactaggataagagtgttataagggagtttaaggcgctattttttccctgattccatcttttggattttcgtttgcacgctccacgctttccaagttcgtaaatggtgcttttcttaaacatctttttaactttttagaagttaattcattcgtttataatctcaaatagctatcacataaataagataattcatcaatttaagttgtcctaaaccctaaaccctaagtagtacataattataattttttcatgcgagtcatgatgatcagtaaattggtgatcaacgcataatcaaagtcgtaagatgaatatgtaagagctactataaataattgtaaatatgactatatataaacatggacgaagctagaatgaatattaacatatatcccatacatatatattacatggttaatattataattacatgtggtaagtccattaaaatttcttaaaatgccctcaagctgccacgtgatgctctaaaatattagaaattataagaaaaaaagcaaagtatctattacttgattttcacttaatcgatgggtccaatattataaaccattagattaaattgatcttagaacaaaccaaatactacgaggttccacctctccaccttcggtacgcacctacgtacgtgggtacctacgcttcccctcccttttttccatttttccctttcttctttttctccatgtatacgcttccctccctttcttattgtatcatgcaccttcatgagacgatttaatcacaagaattttaagtatcttgctctcactttttcatttgtagccatactacaagcaatagtttattatttactcgagaaaaagaacatgattcaaaaatcgtaagtacttaatcaatctcctactcaaaagtttatgaatggattttaaagataccttaagaaaatagaacccttaaattattataaaataacagtatctaaactttagtttgcccttaatctatcagacaaaatttttaaacaaacagtaaaaatcttacctttcaaataatacaagtgctgcgcgggccaccttcctagtttgttataacttgtagaagtcgaaaacttgcatgtttgcatggtgatatatctcatattaacctatcttatcaattttttatttacaactataggtgacatgaaaaaacgaggagataaaaccagttttccgtataattaagtcattgaatatacgaatatatttgagatatctgattagataatctgttatatatgggtggtctctgtatgttattgagccccgttgtttcgcttatttgtggaataagccatatgacatatttgcaaatgaaaagtaatttgtgaataaaacttatatatacatgttcttaacgatctaaaagcaaaggctgaaaaataaactacgatgaaaaatccctaaaataaactctatatttaatattgaaatttgaaattttggttgataagcataagcatacgcaaaaagatgaggcctataagttgtaattaaaatgattatacagataatagtcgtctaaatcacagtatttatgctctgaacttaactgcgaaagttgcctacaatcactattcatgctctgaactccacagccaatatttgactaataactgcaagctgtattaatgccaatgggatggtagtccaaaattccaaatcgctatgcgcctttcattttgcaattatttctcttgcctatgttttcaaactagagatagcagccagacaacaaataataaatgaatcaacttctctctatttatgttcccccccaaaataaaagaacttctccctatttataccatttccatgaagtgctcgacagctcaaaccatggccatggtgcaagacatcaccggctacctgtgcctctccttggctctcctcttgctcactctcgtcctccacaaggtggcgaggaaggcgaccggtaatggcgccggcaagccgaggcttccgccggggccgtggcggctgccggtcatcggcaacctccaccaggtcgcgatgggcggcccgctcgtccaccgcaccatggccgacctggcgcgccggctggacgcgccgctcatgtcgctcaggctcggcgagctccgcgtcgtcgtcgcctcatccgccaacgccgccagggagatcaccaagacgcacgacgtcgcgttcgcgacgcggccgtggacctccaccatccgcgtcctgatgagcgacggcgttgggctggtgttcgcgccctacggcgcgctgtggcggcagctccgcaagatcgccgtggtggagctcctcagcgcgcgccgcgtccagtcgttccgccgcatccgggaggacgaggtcggccgcctcgtcgccgccgtcgccgccgccccggcggcgcagcccgtgaacgtcagcgagcggatcgcggcgctcatctccgactcggcggtgcgcaccatcatcggcgaccggttcgagaggcgggacgagttcctggagggtctcgccgaggcgatcaagatcacctccgggttcagcctcggcgacctgttcccgtcgtcgaggctggccagcttcgtcggcggcacgacgcggcgggcggaggcgaaccaccgcaagaacttcgagctgatagagtgcgctctgaggcagcacgaggagcggagggccgccggcgccgtggacgacgacgaggacctcgtcgatgtgcttctcagggttcagaaggatgggagcctccagatgcctctcaccatgggcaatatcaaagccgtcgtcctggtaagtagacaagtacttgctgattaatactgtactaatctcccttaattgcacacgaatacttctgagcttagagtagtatttatcttaccaataattaatttttcaatcgtatctacaatcgtaccctaacgtacgttctcttccctaatttagtgaaggttcaatcacactttctggatctataatccattatattcgtgaaaggatgaaatataagacatattttaccaaacctcttttacctgagtgcacttaaaatttgactactgttaatgtcaaaatctacaaagttttaccgtttaagaataaaattaaataactttaactgatgaatggagcgagtatatatgaaaataaaaaaaaagtatgcacactgaacaaaggaaggaagtaattgataacatatttttttacatatatgggaaatcatgttttttttcatgcatataggaactttttggtgctgggagcgagacatcagctaatacacttcaatgggcgatgactgagctcataatgaatccaagagtgatgctgaaggcacaagctgagttaagtaacgtcatcaaaggaaagcaaacgatatctgaagatgacttagttgaattgaagtacttaaaacttattatcaaagagaccttaaggttacatcctgtagtgccactacttctccctagggaatgtcgggagacatgtgaggtcatgggttacgatatccccataggtactactgtgcttgttaacgtatgggcaataggtagagatcctaagtattgggaggatgctgagacattcatacctgaacgatttgaggatggccatatagacttcaaaggaacaaactttgaatttataccgtttggagctggacgaaggatgtgccctggcatggcatttgcagaagtaatcatggagctcgctctagcctcattgctttaccactttgattgggagctccctgatggcatctcgccaaccaaggtggacatgatggaggagttgggtgctacaattcgaagaaagaacgatctttaccttattcctactgtccgtgtgcctttgtcaactgtcttatagttgtttacacttataaatagtatgtttgtctcgtatgtacgtgtctaaatgataagctatgtaacttttgatgatgtgtactcctacttcctatcctacctattataaattattatttaagtttaattctcaaattattcaatttatttttataatcaagtagaaaactcatgacaataattccatgaataatctgcttttcaattttgatcgatgactgtcacctcattacacatatatgtacttgcatgcacaatatctggtgtagactctgcgacgccataaccatgaacaatacgtaagagggaggataatagtcgtgtgcctcctattgctgacagtgactctgctaacacaatgacgttgtgtgaagagaagaggagaagaggcgtgctggtctgctggagcctggaagtaggaagggaaaaggagggggatggaaagaggagaaaagaggctcacgattcagcgaattataaacttatagtggaattgatttgatcagttttaagaaattttcgaaacgtggaattcggaattcttgctctggtcgatgttgtggtgtgcttgactcagttctgaaccatgccagttagcagttttaactccccagaacttctcgtttcaaacataattaatcaacggaatctgaagtctttttagaagataaatttgcaaaagtccaatatttcaaaccctttttctccttcacgtggaattcaaaagcacatggatgttgcgaagtggaatcagttgatccgaattcaaattctagacttgatatgttcacatttacgactaattcatctttcagtgatatataatatactcgtcgatagtgtgacatcaatgacgacttcatcaatctaaaggtatactccgttttagattataagatattttgactttggttaaagtcaaactatttaaagtttaaccaagtttatagaaaaaatagaaatattttcaactcaagatttaatattgtaatatttacattaccaaattagttttattaaattaataattaaatatatttttataataaatttatttttagttgaaaatatttctgtttttctataaatttagttaaatttgaagttataacctaaaacagggagtaccggtaagtattttgaaggtgcttataaaaataaagtacgcgcgtgcatttatactaacgagtgtgcgagtacatggatttgtatttttgtcttttaaaaataagcacgtggaagctagacgcggtgctggtctctctccggctctccccacgtgggccaggccccacctgtgtcggtgtgttactagctagtgattgattcgatgaaaagcggtgatcaataaatacttatattgtctttgagattagtcggcaaagaagtgtctgcaaatcttgcagtttaagaacggacagcattacatcatcatctgaacattattgttgcgcttgcactaaatcatacagttaaagtgtaccacctctttttttttttttataattgacgtgttttgaacgtatgacacatgcatgctctataaaaagaacatgagaggtcctatttaaaattagcattcgatcttttcattctcaaaacatcctcttgatccgcttgaaaattcttttgaaaaagagttcttccacgccttagaaaaaaaaagcttgttcggttaattcttatgtgaaggccggaaggaatgttggagattaagtaatcctctctaaatccttcttaactttttatgaaggaattaatcgagaagggcattaattttatatatctatatggttcattctcactaagtgcaactagtgctaattttctcttttcacagcttgccacatcacttcaaattaatctagccattagatctaaaattgatgtccaagatgtttactttctagcgtgcagcaagaatgtctttttaagtccaaattttcttgggccatgtcactctaccggttcctgcatgtttacatgcatgccaagccattccacctttattattagccataccattattattggcccactatctttcggtggactgctcatcttctagaaactgccaagccatacaaccagtcaaccaagctataaattaagcagtggcatagcataggattagccacattcattgatcattcaagatttcagacaattgtgagaaatttcatctcacatctattgtcgagacccaatgtcagttatccggtttcatacacccaagcaatttaagattgtcaagattttatcatgaaattccgggctgttcatattgatgctattttcaaccatattattttttttggcaacgttatcaaaaaaaatgtcaacgtttagtttattgccaaactttggcatgttgataatattgctaaacttttggtaaggtttattttggctacaatctaaacatggccttcatacacccaagcaattcgagactcatgaaatttctcacaatcgtttgtaacattcaagatttcaaacacccaagcaatttatctcacatcgattgtcaaggctcatggcagttctccaattttatctcacatcgattgtcaggctcatggcagttccccggttttatcctcaatcagtttggttctatatgacaatcggtcatctcttctcctaatctcctggagctgatctaatcatgggtgttatctaatctttctatcatgagacaggtattttgtttttcatcgccatagctttgttttggtatctaatggtgcattaaaatatttacattatatcatcctctgttttttaagcttgcttatcagcttagttattaaataatatttgtactagtgctaagtaaatcttttatcttaacatttattgacggacaatcgctaacatggaagtactaccttagtatagtccaacataacggcagaaaaaaggaagcatggttcactgcttcacccttttcactctgtattgaagattcttcttttagaaaatttgagtgactaatctcttcctttgcagcacactcatatattaaacctaaatgtataaccgcattaattatttgatacacatgtattgagatttctcaattaatatatacattacaacctaaatttcaaatggtggttgccttcatttctaacatgttcttagaatgcacatccttaccaggatagtaactactccctccgtttcaggttacaagatattttgactttaattaaaatcaaactactctaagtttaactaaatttatagaaaaaaatagtaatatttacaataccagcatagtttcattaaatctataattgaataaattttcatcatatatatgtcttgggttaaaaatattattactattttctacagaattagtcaaacttagagtaatttgactttaaccaagttaaaacgtcttataacctaaaacagagggagtatttaacacgtaaatattccgcagcaatacgtgggggtgtcatctagttaatttatattttgaggtttgcccgtctataagggttggaacccctctcggcatacaaaataaacaacgtttctaccgtctataagtttctagacatctattggaatccatccaaatatttccgacattagaaatttacaaatgctgtctccggcgccgccgctcctgcagccacacttcagaactttctacttgctgtgtttctattgcctgtggaaccatcgacatgatgtggtcttttgaaacttgcaatctcttctcaaccttttgagacgatgtttagaagaaacaaacctctaggaacaccgtttcaaaatcccagagagaatagcagtccagtcttggaaagctatattttccaattctattttctctttgcatttgtaactgctagctgctagctagcttgaacacttcaattgtaccctatttttctcttcaatggaaatctaggtggggaacctctcccctccggtgattattaaaaaaaattaaaacaatgtatcagcgtatgattcattaagtattagtttaaaaattttagagaaagaaatctatctattatattattaaaacagctttgaaaggaggcaccacattcgctgtgggagctagaaattcccacattaatcggagaaaaagaaaaaaagaaaaaggagagtctaagtagaagtacaatttaaaaatagctaaaattcggaattaaaaataagcaatattgaaagaagtttccacataagaacccaatacgagattaatcaaaattcgaaataaaaataaaaaaaaatctaaaactagaaaaggaaaggagagtccaagtagaaatacaatttaaaaatagatgaaattcggaattaaaaataaggaatattaaaataagtttccatataagaacccaatacgagataaatcaaaaatcgaaataaaaataaaataaaatctaaaattagaaaaggaaatgagagtccaagtatgaatacaatttaaaaatatctgaaattcgaaattaaaaataaggaatgttaaaataagagtccatataataacctaatacaagattaattaaaattcggaataaaaataattcccacattaatcggagaaaaagagaaaaagaaaaaaaaggagagtccaagtagatgtataatttaaaaataactgaaattcaaaattaaaaataagcaatattgaaagaagaatccaatacgagattaattaaaaattagaataaaaataaaataatatctaaaactagaaaaacaaaaagagagttcaaataggaatacaattttgaaacaactgaaattgaaaataaaaaataaaaacattaaaataacacaatacgatattaactaatttttttaaaaaaattctgaaattagaaaaagaaaaataagatatcaattaggaatacaatttataaataactaaaatttgtgataaaaataaagattattgaaagaaaagaccatctaaaacacatgacgagataaattaactaacatgcctataaagaagtagagtggtggcggttgatacgagatataaaaattgttaataaaacatcaaatagaatcctaatgacgattaaaaggagagacgtcaggcaggccgtgaagcaaacgagtaaggcgattgccgggacttctagaaagtaaaaaaaaaacaaaccccattgataatcatattcgatttttaaaatctcaatgataataaaaaggagaagcagcaggcggggtgtataagagtacagttgcagagctgccgacggttaacaggacttctagaaaataaaaaaagaattctagaatcacaatgataataaagagttggcggcggacgggctatagaggggcatagtggcatcgtttgatgggacttctaaaaattataaaaaaataaaactacaagtccaatttttaaaggttttgaacttctaaaaagtaaaaaaaacccaatgataatcatgttcaattttaaaatctcaatgccaataaagaagggagacagcgggcgagccgtagaggagtacaatagcaaagccgctgacggtttggcgggacttctagaaagtaaaaaatgaacccaaacgataattatgttcgatttttaaaatctcaatgacaacaaagagaaaagacagtggacgggccgtagagtagtataatggcaacgtttgatgggacatctagaaattataaaaatgaaacccaacatgacaataaactctaaaaactataaaatccaatttttaaaggttccaagaagaatgaatgaaaatagtggtagatcgagcaagcaaataaataaggagatgacataagagttagcaactggtgtgacttttaaaaactatatgattagaaacacggggatagtaaggtttggtctttcaaagtcttaaagacaatgaaatagctagatagctatttaataaattttaagtaaaataatacttaaaaatatatgattttgtttaggtgctagccgcgcaattgcgcgggccacccagctatttaatatgaaatttgttttagaaaaataaatgtacatcattaattgttcggaaaacgttacgcatggaaacgagaaagtgataccatctaaaacgttgtacgatttatgctaatgaatactcgaagaagatgataacttgtaacccccatatggcgccaaagcgaaccgacgacggcaaactcgatcggctatgggcctatggcagtggcaagtgataacagggctgcttttgtcacttgacagggtcacctccgtccggaatatccgtggattctgcgtcgccagggcggagctagtatagctaagggggtgtccatgaacccggttaaaaaaaattacctatattttatctattttcactatttatataccccgttagtttaaatttagacatctgtatcaagctaaatttgattcaaatcaaagtaaaacaagtaaatggaaccccttcgttttgttctagctccgccactgtgcgtcaccacatatggagtaggagtagatggagaaggttgcgtgctgcttcgacctcctcaaactcaaagctcacgacgaagctgaccgcggcaaaggcggatgacgatgaggcccgagcagcagcggcctccatctggacatgttccgtggctcgctctgccaccgcatactctcgtttactaacgctttatttagtcctttaaattcttttataaggttttttaaaaaataattaaatttataaaaatatagtaatatgtacaaaattaaattaatcttattaaatataccattgaatatatttttgataaaatatttgttttgtattaaaatattgatatattttttctataaacttaatcacactgtaaaataattaaaataacttataatataaaatggaaggagtagtattttttttctgatttactagtgataaatccctggccataataactttctattaaaaatgcatcattgttacgtaatattaatagaaatcaggattaatttaaagcttggtgagtcatataccacgactccattaccgtttatgtttgtactttctatctaagttttaattttcatttgtgataaaaaaataattttcatttgacaaaatgtaactcatctgctttgaacagaagacagcagcataagcctctaaacgtggaaacaaatgaaaatattaaattccattgacgggagaccagaaattagctctccgcctctccctccgtccttgaagttctacagctcaagttttgttttaaaatgaagctagatcacctaattagcttcattttaaaacagaacttaagcggtataactacgattaattaggggattgtgattggccgagaagagaagaggaagtaggtgaagaaaatgagtgaaaaatggttataattggttgcatgatccgctcaccattagtcgtagttgctgaaccgactttaccaatcattgaccaatatttccgatcaaaaccgaagtcgctacacatgtagcaaccaatatccaattgcaaacaacaaatatcaagcagtaacaatgtgcagtcaccagcaaggacgaagtgctactgtgctagcctccttgattcgccaccaccaagcgaatgggagaaaccatccctgctactaccgcagccaatggctgcggcggcaatggaggcggagtagataaggtgaagacgatgatggataggccaggttgggggtcagcggcccatgaggttcggaagtttttatgttcgattagtatcgatagacatgactccatagaacttatatgtacaccctcctagtcctctatctcctttctccagccaaaactgagccctggtccaagtatagatggccatatgatctgaggcccatggcttggcccaagcacggcacagcccgactagggtcgtaccgtgtcagcctggcccgacagccggaccgagcctgggctgcaccctcgaaacggtgggccggccggcacggcatgatcgaagaaaaatagtagaggaatccaaaatagacttaaataaccatataaggcaaggcccaaagacaagaggagtataaaacagacttatttttcagccattatggacatagccacagagtcgagggatgagaaatagactaattctgtggagaagcacgatggacccgagtcgtattggaccgtgtgtgtagcccgtgggctggcacgacacggcccggcgtgtaggtcaggccgtgcgggcccgaaaaggctcgaaaacctcggcccagacactgccgggcctaggccgtgctgtgccagacggcccatttggccatctatgggcccaagcaagccagttcaaccagagcctccctccacacatcagttgtgccctcctcatttgctggtttatcaactagtatcaaatttgaattttaaagcttagttttagagttaatgtggattttttatcatattcttttttaccttagtttttaatttttttataccctagataaagtagactaacaaatatttactcataaattatttttgatgcttgctcgtttttttcctgcactcataacacaactgatcactacttcgggtgcaaagttgtaaactcaactaattaccgtaagagggtcagggtttcaatcatttaggtggacgtccactcatttattgccgttctactatcttactgatggatcggctgtgggaagaggtgctcaattcacaatcagcctttccctttttcagatcagtccgcgtccaccgaagaaatcgcggcaaactcggcaaacttttgacgtttaccggacaggcaaagctaccatcacttcgttgtcgttgctgtatatccacgaccacgtcaaaactgatcccatggcgccaaactgaacaccgtgtcgatctccgacctcgtcgtcgccgcgacaaaaaccgctttgatcatcacctcgtcgtcgacgcacctccaccgcatatgtagcagtagacaagtagcatctgcatctgcgtgccatacacgattgctccagctagctgcacctgcacatcgccatggccatggccgacctggagttggagaaggttgcgagcttcttgctggcggcgctgctgccgctcgtgctcttcaagctggcggcggcgaagcgcggtggtggcgatggcggcatgaggctgccgcctgggccgtggcggctgccggtgatcggcaacctgcaccagatcatggcgggtggccagctcgtgcaccgcaccatggccggcctggcgagggggctcggcgacgcgccgctgctgtcgctcaggctcggcgaggtccccatcgtcgtggcctcgtcggccgacgccgcgagggagatcatgagcaggcacgacgccaagttcgccacacggccgtggagccccaccgtgcgggtccagatggtcgacggcgagggcctcgcgttcgcgccctacggcgcgctgtggcggcagctgcgcaagatcaccatggtggagctgctcagcccgcgccgcgtcaggtcgttccgccgcgtgcgggaggaggaggtcggccgcctcgtcgtcgccgtcgccacggcggcgacgcggcggcccggcgaggccgccgtgaacgtcggcgagcggctcaccgtgctgatcaccgacatcgcggtgcgcacgatcatcggcgaccggttcgagcggcgggaggatttcctcgacgccgccgccgagtgggtcaagatcatgtccgggttcagcctcggcgacctgttcccgtcgtcgaggctggccagcttcgtcagcggcacggtgcgccgggcggaggcgaaccaccgcaagaacttcgagctgatggattacgctctcaagcagcatgaggagaagagggcagctgctgcagctgccggcgccggcgccgtggaagacgatgaggacatcgtcgacgtgcttctcaggattcagaaggaagggggcctcgaagtgcccctcaccatgggcgtcatcaaaggcgtcattcgtgtaagcaagtatacattcttggtcatgttctatctgtgtgataatgttagtattatattagaatataaaattcatgctaaatggtagtaagaaataaatttacatgtacaagaatataaaatggatggtaactagtaagagttaaatgacattaacatatattgcaagtctttaattgcacctctactacttgttttatgcaacatgacttcatgaaagtttcaaaattttcccctgcattctataggacctttttggtgccgggagtgagacatcagctaatacactccaatggactatgtccgagctcgtgaggaacccaagagtgatgcaaaaggcacaaactgagctacgtgattgtcttcgaggaaagcaatcggtgtcagaagatgatttgatcggattgaaatacttgaagcttgtcatcaaggaaaccctaaggctgcatcctgtagtgccactgcttcttccgagagaatgtcaagagacatgtaacattatggggtacgacgtgcccaagggtacaaacgtgctcgtgaacgtctgggcaatatgcagagatcctaggcattgggaaaatgctgagacattcataccagagcgatttgaggatagcaccgtagactttaaaggcacagactttgagttcataccatttggagcaggacgaaggatgtgccctggtttggcatttgcgcaggttagcatggagcttgctctagcctcattgctatatcatttcgactgggaactccctagtggtgttgcgccaagcaatctagacatggaagaggagatgggtatcaccatccgaaggaagaatgatctttacctggttccaaaggtccgtgtgcctctatagtttggctcgtaactgcttcacacaatatgtgtctcctgtgacccgtacctgccaagtagcgatcatgagcattccattgtgtttcatgcccttatggtgttatgctgctcaacttttttaatgttttctcgaaataagtaccatcatagttgttcatgtaactataaattacgagtttaatttgtgtcgtagttaacaagctcgagttgtttgtgttgttttccctttgctaaaatgctaaaacattcattggagagggagagagtggtgtaagctagtcctaaagaaaattaagaacaccaaactcctaaggtacaatagacaattcagtaattagtagttgagttttgaactatgatgggttcaatactaacattcttaaaagtagaattgaaaaaaatatgtcatatttcaaaatcttcgcacttccaaccggaatggaaagcaaattgaattgactccaccattgatttttttcttaaaagaaaagattaactcctccatggtcacaacgtatgccttgcaaatcgcaagaaaaaaaaaaggaagaattaaaaaatctgcaagacaaaatggcaatacataggttggtggagaggatgcagaaattggaaatgttgcaagcagaagaaatttgaacatggaaaaagaataaggaacaaaaaatgttgaaaaacttgagaagaaacattaaagccaaagtgaaaaggttgaattaatcctaggggaaaaaggagagggtatatacctggaaattgaaataaagggatgaaaaatgtttggatggacaaaacatggaaataaatagaaaagagactgcctatcgaatgtacattcaagagaatttctctcacaaatctgtcaaatgtaactacataattgtaatgaaattacaacataactagtatataactacacaattcgaatgtaagtcggatgtaattcataaccgacaccgtggcttgaaatggaagggccatgcatttaagtctagggttgtgggatcaactcacatcagctactcgcttgtttctcgcatggagcacaaatcttgacacgcatccagtggcaaaaaattgacagattttccctcaattttctgttgaatgtggtacaacagatcctaattgaaaaaagaagatatttgtgttggaaaaaaaccatcaaaatagccacaagacacagagagtagcaagggtccagcctaaaatcaattgcctctctcataactgccactctgccagctgggctcaattcatcgttttcacagtttgagatcactcatttactccattcggtttcattttaattgacattttggacaatgacacggattacaaaatatatctttgatcttatttttctactataatatatacaataaataaatgcatgtttacttttattatagtgctttgaaagacaaatctatatatgttgttctagtttgtttaaagtaaatatttttaaagttattaatggtcaaagttataaaagtttaacctaaccttgtctaaaacatcaattattatagaaccggagagagtatctttttcattgattttcccgacaccaaaattctaaaaaagtcaagcaaagccagtggccaccgctgaactcaaaatagacgttattacataatctgataatcatcatgcatccatctatctcttgcagccatgcatgcatcagctctctttggaagttcatccctagcaattactcccatggcgacaaaatccaactcaccatgacaaagctgcttctgtcacttgccacctagtagtaaacagtaacacctctgcatatatgtatctgcatctgcgtgctgtgtgtgccatggccatggatggcatggagaaggtggcgtggtgcgcttgcttcctcttcctggctcttatggtggttaggttgaggacgaagcggcgtggcgacaataatggcggggtgaagttgccgcctgggccgtggcggctgccgctcgtcggcaacctccaccaggtcatggcgcgcggcccgctcgtgcaccgcaccatggccgacctggcgcgccggctcgacgcgccgctcatgtcgctcaggctcggcgaggtccccgtcgtcgtcgcctcgtccgccgacgccgccagggagatcaccaagacgcacgacgtcgcgttcgcgacgcggccgtggagctccaccatccgggtcatgatgagcgacggcgtcgggctggtgttcgcgccctacggcgcgctgtggcggcagctccgcaagatcgccatggtggagctcctcagcgcccgccgcgtccagtcgttccgccgcatccgggaggacgaggtcggccgcctcgtcgccgccgtcgcggcggcgcagcccggcgaggccgtgaacgtcagcgagcggatcgcggcgctcgtctccgacgccgcggtgcgcaccatcattggtgaccggttcgagaggcgggacgaattcctggagggccttgccgaggggatcaagatcacatccgggttcagcctcggcgacctgttcccatcgtcgaggctggccagcttcatcggcggcacgacgcggcgggcagaggcgaaccaccgcaagaacttcgagctgatggaatgcgctctcaagcagcatgaggagaagagggcagctgctgcagctgccgccgccggcgctgtggaagacgatgaggacatcgtcgacgtgcttctcaggattcagaaggaagggagcctccaagtgcccctcaccatgggcaatatcaaagctgtcgtccttgtaagtactctagttgttctccctttttttttcttttcctgtggatgctaatactatatctcccttaatttcgataggatttattttattttttaaaaaatctttaataccaaactataaatttatttggtcacaaaaatataacttaatagctactccccctttcgcaaatataaagtattttggccatctccaattgtcaatagatattagggattttgaactactatggacatgttttaattgcacctagcacctatcacttaattttgttcctttcttatcccccaaccaccatgaaatcatcttcgcttatttaatagaggatatcattgtcttgttttcatccttaatctcgctaaaaaaacatagcatccattatgatggagtaagacacaactttaaaatataaatccactaccgcaacaatacatctagtttaactactgtttaggtcagaatatataaaatttacctttaaagaataacttatacggataaatggagcgagtacatgaatttcctttttataaaaaagtatgcatagtgaacataggaaggaattgatacaatattttctacactttatgggaaatcatgtattttttaccatgcatataggacctttttggtgctggcagcgagacatcggcaaatacgcttcaatgagcgatggctgagctcataatgaatccaagaacaatgctgaaggcacaagcagagttacgtgatgccctccaaggaaagcaaatagtgtcagaatatgacttggttaaattgaagtatttgaaacttattatcaaggagaccttaaggttacatcctgtggtgccactacttctccctagggagggaatgtcaggagacatgtaaggtcatggactacgatgtccccataggtactattgtgcttgtgaacatgtgggtaatcggtagagaccctaaatattgggaggacgctaagacatttagacccgagcgatttgaggatggccatatagattttaaaggaatgaactttgaatatttaccttttggagcagggcgaaggatgtgccctggtgtggcatttgcagaagcaattatggagctcgctctagcctcattgctctatcactttgattgggagttccccgatggcatctcgccggccaagatggatatgatggaggtgatgggttctaccgtgcgaaagaagaatgatctttaccttgttccaaatgcccatgtgccggttgccccatagttgttcacacattcgtacttgttcatcttgcaacctctgtaataactgatgtaacttctttggagtaaagccaaaatgaattcaattataaaaaaaaaagagttcgaaattgttgctgcgctcctctagggcgcccctaatgcgcgacaagtcgcgcagtcacacgagcgcgtgaccaccaggtccactactactactcatagtcatacactactactactacagtactactacgtgtatatatgcatatgtatatatcttgtatacatacatataaactttgtattattgtatacatacgtataatttttatattaataatacaaagtttatacgtatatatataaagtatatatatacatgtatatataatttttatgtgtaccaaaaaatcaacgtataaaaaatatacacatataccaactttgcatacgcgtatacaaactttgtatatgtacatgttaaaaaccgtgagaaaaaaatatgaatacaaataagtttgtatacatatgaatacaaacttggtatacacacgaatacaaactttgcaatatgtacatcttaaaaaaaagggaaaaaccaaaaacagaagagaaacgaaaaaacaaaaaagaacagaagagaaacgaaagaaaccaaaaaaagggaaaaatcgcacctccgtcatggcgcgccgtccgccgccctctccacgcgcgacacatgtccagtcgcgcgggagagactggctgcccattagctttttcggctcctctgtctcctttccccactcaagtcgagccctgggcctcggccgaagtatgctagagtccagacctatctcactctaaacatcctggaccagttgtcattcagtttttatcatttgttggtttgtttactagctgcaatcaaaatctgaaatttaaaatttagttttacaattaatttggggtttttacatcataatctatttttaaaactttatattggtatttagaagcctaataatatagatgtaaattttatttttaagttcttcagtcgtaattcaacctatcactctgaggtcccgtttggatcatttcgtccctggactaaaattagtccctagactaaaaactttagtcccctactgtttggatctagggactaaaagggaagtcacgtggaccgagggagagagagaagagagaggctatcactttagttcctataagtacctctaaggacattcccaaatcccaacccatggtgtccataactagtgtctatggtgtcatgtcaacaagacatcacaataaaaactacactctacaacccatggtttcttaaagtgggccattaataaatacatcatctctcttctccaccaatcatatttattcttcatttattatgaagacactattctctcccaatgcaaaacttgatagtgtctagtgcatagattctcgtgttgaagctgtgtcttgcatgagactcagtttcttcctctcttcactctctctctcttaattaatatagtgtcatataagctaaaagtcctacgtggcaatgtagttaatgccatagacaccatcctagatggagggttgggactgccctaagagggactaatggattttagtcaaatatgcactttttaattcctttttagtcacccatgtttggattcttagggactaaaagggagggactaatggattagtcccatgaaccaaacagggactgaatcttccaaaagagtggtgcaaggttggaaactccctctgtcctaaaaactattcttttggcctttttttttctcaaaaacaccattgtttcaaaatggggtgaattaaacctttttgatactattttattattttgttatccttttagccatgaaaagtaatactacccgttttctctctcttctcgttttctatctgcgttaacgattaaacatagagtaaatttcctgtgtacccctgaaaactcactcaatccctttcatacccttgaaatttacccgatcccttctatacccctgaaatttcaatttgatcccttccatgcccctaccgttacattttccatcatttcactgttacgtttggttgcaaatgtcctttttgcccttgatgatttaggtttaaatataagcttcaaaaacaattaaaaattttgtttgagtgtacagtatgtgcattttataaaactaaagagactaaataattagtgcataaaattttgacataaattttgaaaataaaataaatgcaataaattaaaatttttatttgaaattttaataggacaatggatttttttatcgggagcattcattaaaagaatgttgtgaacattggtagttctatttttatatgaatgctcctcacttttatgactttttttttaaaaaataaatatgtatttttttatttcattatctatcaatattttttgggataaataatgcatcgaacaacaaactcataactataatagtcttatgcaagaagcttttatatttttaataatgtaattcatgaatttctttgttcatccaagggtaaaatggtcatttttatagaaaatagacggtcaactaacggtgaactgacgggaggggtatggaagggatcagaattaaaaggaagtaagtaaaatttaggggtatagaagggattaggtaaaatttgaggggtatacaagggattttctcttaaacatatagtagtattttgatctcctgcttatcatggctttaactagctaaagctaatgtgaaacaagagtcttttagagccaggagtaatggccatcctacttggaaggccaaaacatgaccaaaaaaaaaatcaaaaaatgaagatctttttgttaggaaaaagtaacataacaaaagccacgagataaataagcaaacgtccagcctctctcaaacctgccagctggtgtcaattaatcttttccccttttgtgatcgcccatttatcatttttatttattttccagccactaaaattctcgtaagcatagccagcgcccagcgaccaccgctgaagtcaattaattacaaaatcggacgaccttaattagagtacatcatcatgcatccacctagcatccatctcttgcagccatgcattgcatcagctatctttggaatttcataattagcaattagtaagcagagatttactcccatggcgacaaaaatccaacaaagctgcttctgtcacttgccacctagtagtaattaacagtaacacctctgcatatatctatctgcacctggacgcgagcgtctggcttagagtagcactcgatcgatctgtgttgccatggccatggatggcatggagaaggtggcgtggtgcgcttgcttcctcttgctggctctcatggtggtcaggttgacggcgaagcggcgtggcgacaatggcgcggagaggctgccgcctgggccgtggcggctgccgctcgtcggcaacctccaccaggtcatggcgcgcggcccgctcgtgcaccgcaccatggccgacctggcgcgccggctcgacgcgccgctcatgtcgctcaggctcggcgaggtccccgtcgttgtcgcctcgtccgccgacgccgccagggagatcatgaggacgcacgacgtcgcgttcgcaacgcggccgtggaacccgaccacgcggcggctgcggtgcgacggcgagggcgtggtgttcgcgacgtacggcgcgctgtggcgccagctccgcaagctgtgcgtcgtcgagctgctcggcgcgcggcgcgtccggtcgttccgccgcgtccgcgaggaggaggcgcgccgcctcgtcgccgccgtcgccgcgtccccgcgcggcgaggccgtgaacgtcagcgagcggatcacggcggtgatcacggacgcgacgatgcgggccatgatcggggacaggttcgggcggcgcgacgagttcctggagctgctcgccgacatcgtcaagatcggctccgggttcagcctcgacgacctgttcccgtcgtggcgtctcgccggcgccatcggcggcatggcgcgccgcgccgaggcgaaccaccggaggacctacgagctgatggacagcgtgttccagcagcacgaacagcggagggttcacgttgctgcgccggctgacggcgccatggacgacgcggaggaggacctcgttgacgtgctcttcaggatacagaaagatggtggcctcgaggtgcctctcaccattggcaacatcaaagcaatcatcctggtaaatgctactacttctgctgctctgatttatgaagaacacacattaattcatagtgttttagtttacatatagaaaatagatttacatatggaagtcatctatttctacattattatttgcagaagagtaattcatttttatagaagagtttgttagtctttttttttaagaatgtctattgcttagttgaggttgcatcttgttatttcatttttctagaagtgttagctagtcttttttttttctaagaatgtctattgattagttcaggttgcatcttcttatttcatttttctagaagtgtttgttatttcttttttttctaagaatgtctattgattagttcaggttgcatcttgttattccacaggacctcttcaatgcagggagtgagacatcagcaaatacgctccagtgggttatgtcagagctaatgaggaacccaaaagtgatgagaaaggcacaagcagagttaaggaacaacctacaagggaagacaacggtaaccgaagacgatctcacaaatctaaagtacctgaagcttgtcatcaaggagacgcttaggttacatcccgtgctgcccttacttctcccaagagagtgccgagaagcatgcaatgtcatcggatacgacgtcccgaaatacactaccgtttttataaacgtgtgagcaatcaacagggaccccaaatattgggacatggccgagatgtttaagccagaacgctttgacaatagcatgattgacttcaaaggtacagacttcgagttcgtgccatttggggctggaagaaggatctgtcctggcatagcatttgcacagtccaatatggagcttgtgcttgctacactcctatactactttgactgggagcttcctagtggtatgtcgcctgaagagttagatatgactgaggacatgggactatctgtccgaaggaagaatgatctttacctacatccaacagtttgtgtgcctctgtaggccgtagtctcttttgaagtgtttgtatgacaagtcatgcattatgatgtgcccaatgacttaataaatttgttgcttgaatcaatactttcgtatatttttcgaaacatttgaaatttagccaagaggcgaacaatacatgttattcaaacctgacttagtaataggaaatccacactatctaaatgatctacctcgtccactcacatatgtgctagtctgctagtagggggcatggcatgtgattgttgaatttctaataatctaagaatagattgtccttctttttatcctagaatatattgtccttgattgtgagcatcattttaattcatggaaatgctggctagaaaagaaatgtaaggagagggagaggtgggtggatcccacatctggagaagaatataataatatcaatgtgaaacacttgtgataattagtgtagtagagaaagtcgagatcaaccatgtaccttacctaccataacatggtatggacaaagggacaaggttgtctcaactactaaacatatcggacctagttacctagtgtgctaggtatacaaaatgatggaggttcgtgtttttcttttaaaactgtaggatgattatgttgctcggagtgttacctaagtttaaaatatattggaattgaatttagtgtccataacggacctcccgctatggttgtctccagatgagcacgacaggaattagccgaatctattgtctaggctcataaaaagttaatcgtcaaaaaaaggctcataaaaaatttaaaatttaatatgtcactgacaagaagcaattatgacatttcataatactattctgatatatgaaccccataaaactcataataataggtattctcatgcaacttgtagggtcaatatcgtgcctcggtaatgcctcatgtgtcatgtaataatatactagacaccatatgttaaagtgtatcttcatatcttctactactaggtatatccccacaataccttattaccttcataagatattcatacaaataataattgattgtctccctatcttaattctcttatattttgagactgagaaagtatctaattaatgtgccggatcccagatatctatatgtaacgctccgcttttcgtgagacgttaaaaactaatttggcaaaatcctaattgcgaaaatttcgttctttgagtgttgagtctaagttgtgccaaagatctccatttaaatccctcccttgtctcgataccctgttatcaaagatcgtctcctcaaaattaccatcccaatgtagtcccgaagctcgattccttctattcgaaatcccctcctggaaccccatccgtgaactttgtcgaatgcccgaatcctaactccgtccaaggattcaccttcgcgtcataagctctctccttggttccttcaaaccgattctcaaattcgaattcaacctctcaggttttgattcatctatctttctccctgtattggttcatcaatctacccttgttttctttctcgaacttctgacccaagtctgaatatgcaaatcgagatcacttccacccttgaactcaaaatcccaagattcaatccctttcgccctgagttctccccaaaatgatttccgttccgaaataatctcaaagtccgaacccttctattcagacttctctccaaaatccttacccacatatctcgttgagtagtcaaactcaaactctcaagttacactctctttctctaaattatccatccccttttcactcgtctccgaatattgttcccttccttgactccttcctattctcccgagaccgagtatcaacctcgaaattcgaatccagactccaactctaaaacctcccaattaaatctctctgtgaaagtctatttaacctccctcataggttggattccttcatcctttttccggtccacctcttccttctcttccatcccatctctctctgaatctcgatctatctatctatcgatcgatccatctatctatctactatggccccgtttggtagagctcctaactccaactcccaactccaaactccaactccagtgagagctagctcctctaggagctgaggtaggtaaaaaagtgtttggctagattactcagctccacatttctacatcctttgtcgccatttcatcgaacaccttctaggcgtcgccttgacgttgccgccgcagccggtcagcccacgagccaccgccgccgggaagcccacgcatctccgccgcctcccaagccgctgcgcaagcgccgccgcacaggccgccgccgtcgcccaggctgcctcctgccgaagcccccgcacgcgagtcgcctaccgacgccgctgccgcgtgccgcccgtcgcggccaccgcaacaccgcccgcagccgccgccaccgcctgccgccgccgatgcgccgtggcctgctgtccccgtatgctgccaacgcagacgccgccacaactggttgtggccgtcgtcggaggatggggaagaagatgggccgccgccacctgctggccccgccgccgcgccgcccgtcctcgtcccccaacagccgctctccgccgctaccgcagccccccgccgccagcctccggccacgcgtgggcgccgcccgtcgtcgtcccgcagccgccgccgcccgccgctgtcactgcccgtcgccgtcgacgctgctgcagcccgccgatgccgccgcactagctcgggattgggaggaagattgggggaggagagagaacgggaggaaagaaggggtgaaagggtagttgagtggcattttcgtgtaaatacactaaaatattagagggtagtgggtcttttggggtggagtggagctgtggagcagcaaaaacccagctccacccccgtagttcattttctaggagtagctctgccaactccactccaaaaaaagatgaatctggaccgtttggcacagctcccgctccaggtaagttggagttgggagctagagttgtgccaaacagggcctatacctatctatctgtttatctatccatctgtcaatccatctgtctatccgtccctctacctatcaacctacctttctgtctatctatctatccatggcattctaccgctatctcccttgttccatttttgaataatgatcttccctttttgaaatcctctgaaataatccttcatgccgccaaatacaaatccatcccaaaaataccaaaattcccgcttttgaagcccttccttgacccctcccttggatccaccttgaaccctcgtgtacaaatatacaaattgaattcaaattcaatctccacatcaaacttctctccaaaacaaaccttccggtaaaagtctattttacctccctcgtgatgatttgggccgaaacctgccgctggcccatctctccccagctccctccatctccacgtgcgccgcacatgaccaccgaaagagagagcgctgtctctctcccttccctctctcgaacgttctctctctctctccctcgccgcccccaaaccgctcgccgccgtttgaatccgctcgccgtttcccgtgcgctcgcgcgcgtggccgaccgtctgggagacgccatcgccaccctcggtcgtcgcctgctccgacgaccaccgcgtgtccgtgctcacctccaaacagtccccgtccttttgcagtcgtcgccggcgtcatcctgtcgagccctgcgccccacgccgcgtgcgtccaaagccgcgaggcacagctcgtgctcccgccccctctcctcccaaaaacggaagggacatgcctcccttttcaccgtccccctcccctttttcccttctgggctgggtctctctctctcccgcccatgtctccttgcgcccggaggcagagcaccatgacgcagacgccagtggccagctcgccgcccccaccttgaccgctccacgctgccagcccgcgctcgcgtttcaaatttcgccgtccgatccaccgccttcgccgcccaacgcatccacgccatcgccgctttcgcactgcccacgaaaccgccgctgccgcccgtgaacaccagccgagctcccttgaccgccaatgtcggtttccctcctccaaaccgacctctcctcctcgcctataaagcccgcgccctcccctctcgtttcgtcttcgcctcgctcgaaacacccgcgccattgttgccggccgccagctgctcgcccccgtctcgccgtcgcacggtccgtcctctgccgcctcctccctcaacctcggtcaccgtcgcgcggccaaccccggagcatcgccgccttcttggtcgccgcggccaagaacgccaccgccgcgaccaagggcgccaccgcacgcctccgttgccttccccggcacgcccgccgtgacacgatgccgcctcggcatcgcgttcgtcgccctgcgccgctgctcgtccatgcgccgccatcggccttcccatcctcaactcgccgccgacgccgttacctcccgtcggtgagctccctacctctcttttcctctgtcccagcactcgcgtagctcgcgtcgcgcgtgctctgtttccgccaccgtgcgcaatcgagagccaccgttggcctccctctcggcgactcctctagccaccgccgttcttgagttccctctctacctccccaagccgttgtttcagccgccggcctcccctctcgccctcgcgtcgcgtcgcccgattcgccgctgccgcgctcggccacttccgctgtgcctcccctgccgtcggcctccctcctctccttgattcccggcgccgccaccttcctcgggccccccctcgacctccccaacccctccccctggccgccgaccttcctcctcgctcccgcgccgtgccgcccctcccgccgccgcaaggcgccgccgcgagccacagcccggcgaccatcgggtcccgcgtcaccgcgtgtgcgccgcaaccccataccgcgtccactaagcccgagcgcgtgagccgcatcccttcccatcgcgcatccacgtcggcatcccggcgagcttcgccgccgccgccggccgtcgtcacgcgtcgtctccccaatccgagccatggaatcggttctccttgacctcctctagccaccggtgttcgtcgctcgcttcggcttgccgctgttcgccggatttccgccgcgcgccgtgagccgtccgatgccattcccgcccccccctcttttctctccccatccgacgtggctgcccacgtggcgttgaccgggcccgcccctgcccagtcagtcggtcagccgtccccctccccctctctcccctggctcgtggacttggcccattggccagccttcctcctcggcctaacaaaacaaaggaagtttacttttactccctcttccgagtccggtgctcacacaccgaagagctaaaggtccgcaattgctccctccaattgctcctctctctctctctcaccttcttattggccccactcgtcaatgagtcaaagataatcttgagaatgtctttccaatattccacaaatatttctctcttctataaattcagtaaattattttatcttatttcatgggttaataaatctttttcccttgatcccataaatcaattctctattccaaaatttcatgaatcattttccttataaatcatttcctttggtcccgcatgtcagagatggtcaataatattcttgagaatattatttctataaatttcatgaatcaatctccccttgttctacaaatatcttccttcgccagaaattctaattaaacttccaaaattcgtatctctcgatccaatcgtccgattgaccccgttccacttccagtaattccataaaattgagatctatttaatggcactattatttagtctaaatagggtctttttcttggtctcttgtttaggtttttgtttgtttgcgcatagttgcggttaccggattttcgtcgatcgtggatatcttgaagattcgtgaagcttcgtgaagaccctgagcaaggcaagccacctttgaacatattgagcctatatttgaacttaattatattgcttacaaaatattatgcattgataggactacacttaatttgtttgccccatctgaaaggcagaccggtgggcctacccaactcgttgcatctgatccttccattgttaattgttatatcatgttcccttgtaactatctagttgcacctcgatattcgtgcactctgtgcgagtatcgacggtcgccttcaaacttaaaatctgagtaacttcttgggtaaaacttggtttacaaaagctttggaaaacccgacgcctgggtcggtgccttgtgaaagaaaatgagttttaaaaataaaactcgcgacacaaggccattcctgggcggaatacttgtgcggtcgcatctaaggaccgattcctttggaattacatccgagcatacaatagtgtgaccacacgggtggaatgggatgcccctggctgagtaaattgctaatcgggggagccttgatgccgagagacatgtggattcgccagggtggtgtcggggaggacccatgggcttcctggcacagtatggtctgggacctaacctgttgttggtctgggacccctctcgtcggcatatggcaatcctgtgtctgctctcgaaatgccttgtcatgaaagcccttaggtcaccagacgtggtcgttctacacgggctaggtgattcgggttagtaatgtcgtgtgggtaaagtgtaccccctctgcagaggttaacaaactgttcgaacagccgtgcccacggtcatgggcggatgtgaggtgattccttagcgtagtttttgttttaccctgttttatgaaaaggtgttaaggtttgggaaacctaatgcttgggaagcatttagctaccctggggacagcgggaccgggtgtccctggaagtgattggtcgtttggggacctctattatcgggaagtttggaaaattggtttggtttgggaaaaactagatttgaagccaactctgggagttgtgcaaatcgtgataaataaatttgttacttctcacctcccgaccgagctgagacttgtctcgctctggttgtagaaagcacacacttagattgttgaaaacttgaaaacaaaactgtttgcaaaataacagccttcccttgaagcctgcattaaccacctaagttcccctggcttgctgagtacgtaagtactcacccttgctctctatataaatatagttcagtcagctccgaagatgaagttgaagtgaagtaaagattagggtttcgtcctagttccctgctgctgcctgtggtgttgggtgttagaccgttggttccgctgctgctgctgttgttggtgttcgcctcgtccgtgtcgtcggttgcattctcgggctgtctgagctgcaacctaagttaaggtaaataagtcctctatttattttaaggattgcaatgattcatatttgtcaccgtgggtaccagcgctatgtcctgggactggtactgagatcgcggtttcgtaggaagcggttcgcgccgtttttcccacgacacgctcctgtcaggtgccgttgtacggcggtgccagattcggggcgtgacactatacagctaaaaattgactctctccctatctaaaataccttatattttgagattgagaaagtatctaattaatgtgccagatatctatacagctaataatttattatctccctatcttaaatctcttatactttgagaccaagaaagtatctaattaatgtgctatatatatatatatataattgattatctctctatttaaatctcttatattttgagactgagaaaatatctaattatgcgctagatatctatacaactaataattgattatctccctatcttaaattccttatattttgagattgagaaagtatctaattaatgcgccagatatctatacaactaataattgattatctctccatcgtaaatcccttatattttgatattgagaaagtatctaattaatgtgccagatatctatacaactaataattggttatctccctatctctaacaataaatctccagctagttggttttgctttacatatgaatcagtttattattgaaggcatgacagaactccactgtccatagctaccaagtgatctgacaacagcaaagtgagagtggattctaagttcaagatgtaggaatatattatatatactctacttacttgggttaagtggcatgttcacgagtgtatgagtatgaggtacgtgtctattgtcgtatatacatatgcattttccgtgtaatcaaaactaaataaatataaaatactctagttagttttcaagcgaacactctatgactcactcgacaacacttatccaaccatacacaggtaccatatacagatatgtatcatccgtgtactaaaaaatagtaatatgctctactttttttaagcgaaatcttccactcactcactagatacttgtccaaccatacataggtgccatgcatacatatatatcttctcgtgtaataaaaaatattaaaatattatacttatttttaagcaaactctccttcaatagacacttgtccaaccatacataggtaccataaatacatacatatcttctcgtgtaataaaaattattaatacattatacttatttaagcaaacactcctttaataaacactagtccaaccatgcagtggtggagtagtatatttgtctttttttctggatgtacaaggtatcatcaaaatcacagctatcaagccacaccacttcattaactttctcattaagaattgatttcgccttaactatctgccaatattctccaggttggaagcctctgctgccaccaaccttctcccatgtataaatagctgggtgcatctcgtccatggcactcacctcaccacacacccacagccgccgccatggagcaggtctcgtgcttcgccgccgccgccgccgtcgtcgtcgtggttctcttgctcgcccgcatgctcctcgcgccgcgcggggagtgggacgggctgaacctgccgcccagcccgccgcggctgccgttcatcggcagcttccacctcctccgccgcagcccgctcgtccaccgcgcgctggccgacgtcgcgcggcagctcggctcgccgccgctcatgtacatgaggatcggcgagctcccggccatcgtcgtgtcgtccgccgacgcggcgcgcgaggtcatgaagacgcacgacatcaagttcgcgtcgcggccgtggccgccgaccatccggaagctgcgcgcgcaggggaagggcatcttcttcgagccctacggcgcgctgtggcgccagctccgcaagatctgcatcgtcaagctgctcagcgtccgccgcgtcagctcgttccacggcgtccgcgaggaggaggccggccgcctcgtcgccgccgtcgccgcgacgccgccgggacaggccgtgaacctgaccgagcggatcgaggtggtcatcgcggacacgacgatgcgccccatgatcggggagaggttcgagaggcgtgaggacttcctcgagctcctcccggagatcgtcaagatcgcctccgggttcagcctcgacgacctgttcccgtcgtcgtggctcgcctgcgccatcggcggctcgcagcgccgcggcgaggcgagccaccggacatcctacgagctggtggacagcgccttccgccagcggcagcagcaaagggaggccatggccgcgtcgccgcctgacatcgccaaggaggaggaggatgatttgatggatgagctcatcaggatacacaaggaaggtagcctcgaggtgcctcttactgctggcaacttgaaagccgtcatcctagtaagtatttttcttactcccctgaatgttcagatcagaatagagcttttctactactctggttgttcaggtaagatttttctgctactctgattttgtttttgaaggaaaaaaacagttcagacaaaagttcagaagagtatatatatatatatatatgttcttgcagatagtgttcaattaacttgatgtagcatatgtattttccttagttgtttatctggttaaagtttcacatgtgttgcattttggcattgtacaggatctctttggtgctggaagcgagacatcctcggatgcgctccaatgggcaatgtcagagctgatgagaaacccaagagtgatggagaaagcacaaaacgaggttcaaagcatcctcaaagggaagccatcggtgaccgaagccgacgtagccaacctaaagtatctgaaaatgattgtcaaggagactcataggctacacccggtgttgccgttgctcatcccaagggagtgccagcaaacttgccagatcatggggtatgatgtgccccaaggtagtgtcatatttataaactcgtgggcgataatgagggaccccaagcattgggatgatgccgagactttcaaaccggagcggtttgaggatggtgagatcgacctcaagggtacaaactatgagttcacaccatttggggctggacgtaggatctgccctggcttggcattagcccaggccagcatagagttcatgctcgccactctgctctaccacttcgactgggagctccctaacagggctgcaccggaggagctggacatgactgaggagatgggcatcaccatccgaaggaagaaggatctctacttgctcccaactctccgtgtgcctcttaccgcatagcaccttccgtccttgatgtgtgcaatcagtatgtgtgcttgtgatgcctctacatgaggtcgcacaagttgtacctcgctgctcgtttcggctttaataaaccgacagaaatctccttattctatgtttggctttcttaataaggttccatgtttcattgctgtgatttctggcactgcgatttacttacgggagaatcaacaaaaatagttcattgactccaacaggaggcagctaactatcgaagtgcaaccgatgctaaaaaccgatcgacagtgtgtacatgaacgtgagtcgcgacattgccggctttgtagccgtgaggccgccgcgcatatcctccggatagttgttaaattatagtacatgggagcaaatagctagatcctcaaacaactatctcctgggatagttgtatagctatagcaggagatttaaaaccttgcaaaagacaccaccgcatttatcaacgtgtaggtgatttttggggaccctaaatattgggacaaaggctgcccaaggagttcaagctagagcgaatcacagataacgcaattgattttaagcacacggcctttgaattcattccacaagttgtatgggcatgttttttttttttggcatgctggactatacgagcatgttgctattgttgataatatagaagtggaaaccacatattttccaaagaaaaattgtccaaatcgagcagaaaattttggaatataataactagagaattttcacgtataatttcacgaggtaaaggatgttgatgtgaaaacacgaggcctgggagatctgcttaactcaagtgcaggttcaaaagcttgcttttaggtgtatgagcgtgccagttgatttgatcctgcaatcaacaagaaataaagacaaagaaaccacggttaaattcataaacgatagccgatcggctagttgccgatgacatatcatttatctttgagccgatgtcatatgtgaatcgatcggcagtcatgaataagtaagaaagaactaaatctattcgatcggctatagatattaacaatatatagtctctatgtcgatatatacttaaatcaagtgattgggatatatcggtcgccatgccgagacagtataaatcacttagatcgaaatatatattaacaacaagactatatatgttcatagcatagccgatcagatagatctagcatgtatcggctaatactccgatactagtactctatattaagatatcaaagcaagtaaaatataccaaacaaaagcctaatatacataaatgcaacaatatcttaatcataaaggacagatttaacatgtcaatcaagcatataagataaatgtagttaaatcaggtaagatcggctgaaactccgatgctaccctaatcggcaaccaaaagcaggctagagattgagattctaatcacgacttataaggtcaaacccaactgatgcagctataagtatgaaaagaaggacaatatctagacaatcaaaccgttggatgtttcatagagtggtgaatatcctatataatctaagtcaacgtcggtatttaacctaatcggctgccttctaataacagacgttagccgattggaggttagataacgatattgccggagattatatgggatatatgataactcgacgaattatataaacaagattagagtatcataaagatggaagcactaatcccgagaacgcaagacgccataacaatagttgaagatcgaaaccgatgcagctcaacccgaaagtaagaactcatcgaaacaaaacgaaagtaaaagggtggcgatgcgccaagattgtattgaacgtgtgttagattgattacatagggttcggggtctatttatacccgagattacaaaatatgtccatatcgtacatgactcttatctctaacaaactctaagataccataagtctttgcggcagacttttgcccaaaacatatctctaaggaaattacatgaaatgtcataattaatagatacaattgccttttcaggactctatccatatgtggcaatcattatgaagcacattaactcaacccgacaatgcatgccgtgtcatattgtcggattcggctcaatcggctaaccctgtccaacttggactctgtcgatcctgatcgcaaccgactcggacttcagatacttactctgtttccggagtgatctccatctcgtactccgcttcgatcccatcttcatctccgttacttggattaccaaatttggtcgttaacaaaggtataattagatttgaattacaactcttatcttccatttttataagtacaagtatgcaattgtaatatctacatgaaaaaaaaaacataattgactttcatactcaactataatttgtataacaattagattcaatatatggctcttagcttctgtttttataaataaaattgtttttttacacaactatattgaacaatctacaccgctatattttgaatactataatttaatggccaagatctttctttttattcttcaattaagtgagaatttttagcctctagaagaaatgtgttgccttcatcttttatctattttttactatagtagatatatcggtagatataagtagataggtttatttttttaacaatatatggatatagatttgtaaggttatggataacatatacctaatagtaatcaactaagcttggcggggctcatcatataccaagtcctatatggaatcataccacgtatatagaaggagttccggataaggaagaacaagtagagttctacatggaaactgtaagaactactcggattgtatgcatattggtctcctagttctacttggacaatgggacatctatgggtataaatacaagacccattaggaggagagggagagggagagagacgaagacaacatctgtcagaatagacaccaatacacgccgccggacatcaacatcagaaataagcctagacatacccaatctggcgcctacggaggatgacaagagggatctggcgctatctctaatcttgccgggtacttattcaaggaggaagactaccctgtcgtcgacaacgtgttggtgttccatgctgccaagttgacgacaagtagataggttatctcaaatattgtacttgtgtaattctgatgaataagagcaacatcggctttggccaacaggagtagggttattacctgattctgatgaataaggggtccgaacctgtatatactccgtctcttttacctcaatctcgcatataccctggtaccaatgatcaccttactatataaatacagtagtcgtgatctaaaacattgacaagatccgatcattgtatccataaattgatatacacaggtaatagatagatagatagatagtggatagagaaccaatctctatacacagccaagataggtagatataaatagatagatttagttttgataatggatagagatattgcccctacgttcacaagtggatatacacataaaagatagatagataatggatagagaaccagtctctatacacagccaagataggtagatatagatagatagatttaattttgataatggatagagatattgcctctgcgttcacaagtagatatacacatagatagatagatagatagatagatagatagatagatagtgaacggagtacaatctctatacaccgccaagataggtagatatagatagatagatttaattttgataatgcatagagatattgcctctgcatttacaagtggatatacacataagagatagatagatatggatggatttaattttgataatggatagagatatggtctctatatttataagtgaatatacacaataataaatagaaagataagagatgatctatgtggcgcctccacctcaagatgacgtcaaataaaatgtatttttatggagactttaacaagacaactcaaacagtgctctccgtttgttttttttccttcttcaaatatatatatatatattctcgtgtaataaaaaaatattaatacattcgacttatttttaagcgaactctatttaatagacacttgcccaatcatatatatagccatcataaatacatatatatcttctcgtgtagttaataaaatacttatacactctatattaataaaatattaatacatatttatcttctccctcttcttcactagctagacacctgtccaaccatatagtggtgtattaactatgtgccaatgttctccaagagtccaggttggaagtctctgctgtcactaaccctctccagtgtataaatagccgggtgcatctcctccatggcactcacctcaccacacaccactccaccatcactcacagccaccacccgccgccatggagcaggtctcgtgcttcgccgccgccgccgccgccgtcctcgttgttctctcgctcgctcgcatgctcctcgcgccgcgcagggagtgggacgggctgaacctgccgcccagcccgtcgcggctgccgttcatcggcagcttccacctcctccgccgcagcccgctcgtccaccgcgcgctggccgacgtcgtgcggcagctcggcgcgccgccgctcatgtacatggagatcggtgaggtcccggccatcgtcgtgtcgtgcgccgacgcggcgcgcgagatcatgaagacgcacgacatcaacttcgcgtcgcggccgtggccgccgactgtccagaagctgcgcgcgcaggggaagggcatcttcttcgagccctacggcgcgctgtggcgccagctccgcaagatctgcatcgtcaagctgctcagcgtccgccgcgtcagctcgttccacggcgtccgcgaggaggaggccggccgcctcgtcgccgccgtcgccgcgacgccgccgggacaggccgtgaacctcaccgagcggatcaaggtggccatcgcggacaccacgatgcgccccatgatcggtgagaggttcgagaggcgggaggacttcctcgaggtcctcccggagatcgtcaagctcgcctccgggttcagcctcgacgacctgttcccgtcgtcgtggctcgccggcgccatcggcggctcgcggcgaggcggtcaaccgggcgtcctacgagctggtggacagcgccttccgccagcggcagcagcaaaaggaggccatggccgcgccgccgcctgacatcgccaaggaggaggaggatgacttgatggatgagctcatcaggatacacaaggaaggtagcctcgaggtgcctcttactgccggcaacttgaaagctgtcatcctagtaagtaactttgctactgctcttaatgttcatagataagttttctactattatgattgttcagataagaattttctgctactctgaatttgttgaagaaaaacagttcagatcacaaattaaatttcagatgggtaatatatacacacacacttgcatattgtctttaacttgatgtagcatatctattttccttagttttttatcaggtcaaagtttcacatatgttgcattttgtcattttataggagctcttttgtgcgggaagtgagacatcctcgaatgcgatccaatgggcaatgtcagagctggtgaggaacccaaaagtgatggagaaagcacagaacgaggtgcgaagcatcctcaaagggaagcccacagtgactgaggccgacatggtagacctaacgtatgtgaagatgattgtcaaggagactcataggctgcatccggtattgccattgctcaccccaagggtgtgccagcaaacttgccagatcatggggtatgacgtgccccaaggcagtgtcatattcataaagtcgtgggcaataatgagggaccccaaacattgggatgacgccgagacattcaaaccagagcggtttgaggatagtgagatcgatctcaagggcacaaactatgagttcactccatatggggccggacgcaggatctgccctggcttggcattagcccaggtcagcatagagttcatcctcaccatgctgctctaccactttaactgggaactccctaacggggcagcaccggaggagttggacatgactgaggacatgggcctcaccatccgaaggaagaatgatctctacctgctcccaactcttcgtgtgcctcttaccgcatagcacctaccttcctcaatgtgcgcaatcagtatctatgcttgtgatgcctctacataagatcttacaaaatgtacctcgccactcgtggctgccttaataaactctccttgtttttcaatgtttgattttcttaataaggttatgtgtttctttgttgtgatttgtggcactacgatttatttatcgaagaatcaaaggaattaaatagttaaatgtctccaatggttggcagctaactattgtagtgtaagtgattccgaagagccgacaacgtatacacgaacgcgagtcgcgagattgccggctttgcaaccgctcgccgcgcataacgtgtcctcaggatcaacactgcgcaggataaaacctctattcttctaatatattaacgtgcaattcttgtgtgcgttaaaaaaaaacactacgcaggatagcatccgccgccgtacgtcgcccgtcagtcgttcatcctgtctagctcgtttcaggcagccgatcagttccatctgctgccgcatccgcgcatccgagtgccttgccgagttccgtcggccgtgtagcgtagcgctgtcgccgagcgtccgcgcgagtgctaactgttgcaagcctgaaactgcagctgctaaactgcactgaggcctgaatcctaacgatcaagaagaggtgagagcagcaggcaacagcaacaccaccaacgttgccatcgccaattgaggccttgtttagttcacccctaactactccaaacttccgactttccatcacatcacatcacaccacatcacatccaaaacttttctacacacataaacttctaacttttcctaaacttccaacttttttcaggaactaaacacagcctgaattgcaaatttgttttctatgttgccatctgcactgcacgtctgcaccttgctatgtttttcttttagagaagggtattttctacccggcatctacatccaaccggatatatacggccattgaaatagggaacttagccccgcaaacaacccaatctgaaattcactccataggagatttgaactcaggaccttgagtactactcagatcactgtaaccactaggctacatggttaataggtttgttcgtttctcttgttaattcttcacagagttcaaagcctcagaggatgaacttggagatggaaagttgaacgatactacgctagtatgttcaatccacatgttgtatgggctatttttttcttttttttggggggggaggcatgttggaatatacacacatgttgctactgttaacaatatagaagtgaaagctacataatttcaaagagaaaaatgcccagatcaagcagaaaaatttgaaatataataactagaggattctcgtgtataatttcacacaaaggtaggtaaaggtataattagatttgaaatacaactcttatcttctatttttataaatagaagtatgcaattataatatctacatgaaaataaaaacaaatttgaatttcttactcaattgtaatttgtatatagaggcattttataaatacaaatagattcgatatacgactcttagcttctatttttataaataaaattgtattttgtacacaactatattgaacaatctatacagaggtataatttgaacaatataatttaatggccaggatctttcttttattcttcgattaatatgagaatttttagcctccaaaagaaacgtgttgcctccattttttttctattttttaatataatagatatatcgatagatataaacaagtaggtttattttttaataatggatatagatccaacctccgtaacaaaaaatggatatacacagttaatagatagatagatagattgattgattgatttatttatttatcataatgcacagagaaccagtctctatatacagtcaagataggtagatatagccctcgcaaaaaaaaaagataggtatagatagatagatttaattttgataatggatagagatattgtctctgtgttcacaagtgaatatacactaaagttagatagatagatatggatggatttaattttgataatgggtagagatccgttctctatatttataagtggatatacacaaaaaaaaaaagatagataagagatggtctatgtggcacctccacctcaaaacgacatcaaataaaatgtattttatggggactttagcaaggcaactcaagcattactgctctctccttttgttcatttttttcttctttagatatatgaagtaagcaatttgtatgtttttctctctgtttgattaattgagatggagatatatatagcatccatttgtggcacattacatgggattgagaattagattttcgagcggtactatgtttacagttcaattcccccacatgaaaacgagatatttcaaattccccaaattatgagatgtaaatacatggcctcaaaagcagcaagaaaacacaaggataagtacagtgtccgggccgttgcaaaaatcttagcctcttatgatatctgccgttgccatctcaattcagtgggcaccgctcgcggcgccaccgcatgacgagacaacgcggtttccgtggcgtgtagcagcaggcagcagcagcagccagcctcgagctcatctgcaatggcgccccgcgccaagacggcgccgccgtgcgccgtgcatcgatcttgcagatgaaacggctctctttgtcatctcatctccatcgcctcgtatatatctgttccctagcctagctagctagctatcctgcattgcattgcactcgcgttcgcgtacttacgttgtcgtcgtcgatcatctgatcaccatgtacgacgccgtcgcctgcgtcgtcgccgtcgtcgtcgtcgtcgtcttcgccatgctttgggtgaagctggcgaggagtggtgatggtggtggtggtggtagtggtggcgtgaggctgccgcctgggccgtggcggctgccggtcatcgggagcctgcaccacgtggtgggcgaccggctcctccaccgctccatggcgcgcatcgcgcgccggctcggcgacgcgccgctcgtgtacctgcagctcggggaggtccccgtcgtggtggcctcgtcgcccggcgccgcgcgcgaggtcacgcggacgcacgacctcgcgttcgccgaccgggcgctcaacccgaccgcgcggcggctgcggcccggcggcgccggggtggcgctcgcgccgtacggcgcgctgtggcgtcagctccgcaagatctgcgtcgtcgagctcctcagcgcgcgccgcgtccggtcgttccgccgcgtccgggaggaggaggccggccgcctcgtgggcgcgctcgccgccgccgccgcgtcgcccggcgaggaggcggccgtcaacttcaccgagcggatcgcggaggccgtctcggacgcggcgctgcgcgccatgatcggggacaggttcgagcggcgcgacgagttcttgcaggagctcaccgagcagatgaagctcctcggcgggttcagcctcgacgacctgttcccgtcgtcgtggctggcgagcgccatcggcggcagggcgcggcgagcggaggcgaacagcaggaagctctacgagctcatggactgcgccatccggcagcaccagcagcagcgggcggaggccgccgtggtagacggcggcgccggcgtcgaggacgacaagaaccaagacctcatagacgtgctcctgaacatacagaaacaaggggagctcgagacgcctctcaccatggaacaaatcaaagctgttatccttgtaagtaaaattgacacctgtcgtattaaaagcaaagtaaaatatatctactctcttcatcccagagtaacaggttcagattaagtgtactataatatatcatatctcgtatgagattgatttattttaggacggagagagtatgtgctatcatggtggattatatttgctcaattagatggtacagctctcaaatctttgtagtatttttcattcgatcttttaactttttataggatctctttagtggaggtagcgagacatcggcgactacgcttcaatgggcgatgtcggagctaataaagaacccaatggttatgcaaaagacacaagccgagctacgtgacaaacttaggagaaagccaactgtgacagaggatgatttgtctggcttaaagtatgtaaagctcattattaaggagaccctaaggcttcaccctgtggtaccactgcttgtcgcaagagagtgtcgtgaatcatgtaaagtcatggggtatgatgttccaaaaggcaccactgtatttgttaacgcgtgggctatcggcagagacccaaagtactgggatgacgctgaggagtttagaccagaacggtttgaacacagtactgttgacttcaagggcatagacctcgagttcataccgtttggcgcaggacgaagaatatgtcctggtatggcattcgcagaagcaatcatggaacttctgcttgctgcgctgctctaccactttgactgggaactccctaatggaatggcagcgagcgagctggatatgacagaggagatgggcatcaccgtccggaggaagaatgaccttcacctccgcccccatcctccgtgtgttgtaaggtcaaacttccgtagttttgttgagagagagagagagaggcacttcgtgtagataaataaaatgggttacaatatgatttcatataataggggaaagttttaagactagaaacttcagtattaaatgagtcagaaaaaagttggtgcatcgacaagtttcattcttaagacattctagctctgtgatgacctcgatggaaccatactaccatagagatttgtgttttgaaactggaagctagctggattatgctgttcgagaaatgcatacaattttccacgataaatacattaaatctgagcagcaaaatctgttttacacactattacatacggttagagtaattttgctgtcatcgacagccatttaggctgtgttcttccccaactttcgcaactcaccttcctcgtgtttcacgtgcacgctttttaaaatgctaaacggtgtgctgcaaaaggtttatatacgaaagttgctttaaaaaatcatattaatctatctttttaaaagtaaatatttaattaattataagaaaatatggtactccgttttgcgtgcgtgggaggtgagtttccaacttcacatccgaacacagccttagtagtcttagtatctcaggtattagtatggaccaaaatttatttataacgaatataaagtatcttatggtaaaaaagataaaatcccccatatgattaaaattaatagctctataatggtatacgtaatactcgtcgacataggactgaaaccataaaacactgtagtatgtttgtatgcttccccatttatactttgattttaacaaagcaaccgaactagggtcaaaatttcggaaacccacccacccacaccccacccaaaaccccctctggaaattatttcggccgatttttttttggatatttcatggttttatgtatttggcaaatgttgttaaaatttcaaattatttcggatagaataactaaaaattgagaaacttcagtatccgatacaaataccgaaaatctctccgttttatattataagttgtttgactttttttctagttaaactttattaagtttgataagttaaaaaaaacagcaacacctaaaatatcaaattattttcattaattataacattgaatatattttaataatatgtttgttttgtgttgaaaatagtactatatttttctataaacttatcaaactttaacttagaagaagtcataatataaaatagagggagtaatttgaaccccgaaccaaagtagacaagtagtgcctcaccttgtttggagtagcatgtactacgatccctccgtcccaaaaaaacaactcaacctatgaggggatgtggctcttcctaggacaacgaatttggataaagcgtagcccaaattcattgtattaggagtggtcaaattctcttctaggttgagtttttttttaagacgtggacatggagccaaggttgtcagtatctcgattcgtatcctagtatcttacgatactacgatcctaccaagccgaaacgataccgatcccacctagtatcctatttttatactatcgcgatcctactattcattactatacgatcctacgaaatcttaggtggtattctgattctacgattcctacgatactacaaaatattatttaaaatagcatggtttgaaaataatgtaaataaatatgctcaaatttatataaaaatcagttcaatatatcaaaatcaacgtggtttctcttaataaatgtctctatttgtatgacatatatcattactatattttctttatatagaatggctatatataattaatgtaaatattaattaagcttaaaaaaagaaaatctcatagtatcccgatactacgttacgattctacgatacgatattactttgagcaaaacgttactctctccattctaaattgatctacatattttataggtacaccaagaccaagaaaaactaataactctctcatactatatttactttagcaacaaactcgatgcatacaccatccccaatattttctaagccaatagcaaatcaagatattgcatgtgggatataaatacttgtgtgaatacatgcatcaatgtccatttactccaatgcacaaataacgaatagacttaataaacgaatataaatatgtagatcatttagaaataacatcaaaagaatctatatataaatcaatttggaatggagagagtactacgtagtatccgatagtgacaaccttacatggagcaaagcatgggccacctcgagatgactagcaccgggaattgaagcagtgagcccgtacctacctatctactactactatatgccactccaaatactcgcagaattaaacggtagtctttgtcacttaattggcgccgaagcctcatatatactacgtatgtgttaaccttgcgaagctgcaatgttgcacttgcactgcactcgcctcgccgcgatctgatcgccatggatcacgtcctcgcctgcgtcggcatcctcgtcgccttcacgccgctgttcctccttgccgtgctcccgctcaagctgacgaacggcggcgacggggtgaagctgccgcctggcccgtggcggctgccggtgatcgggagcatgcaccacctgatgggcgagagcctcgtccaccgcgccatggccgacctcgcgcgccggctcgacgcgccgctcatgtacctcaagctcggggaggtccccgtcgtgttggcctcgtcgccgtgcgccgcccgcgagatcatgcgggcgcacgacgtcgcgttcgcgagccggccgctgagccccaccgtgcggcggatgcgccccccccccccccggcgacggcagctccgcaagatctgcgtcgtcgagctgctcagcgcgcgccgcgtccggacgttccgccgcgtcagggaggaggaggtggcccgcctcgtgggcgcgctcgtgtgtttggcccatgtggcccagaagtggttgtatagtggtggtttagtaccaccttgaaagtttaggtgggttaggatctgcttataagccttggtgctgcgccatgattggggccaggttcgagaggcgcgacgagttcttggagggggctcgccgagcaggtgaagtgttgttggcccaaccgggaaaaagcctgatgaaaattcaaattcaaattaagtacaaattaaaatccatgtgctaccatggtagattatacatgcttagttactctactactccctctgttttatattataagtcgtttgattttttttccagccaaactttgttatgtttgactaaatttatagaaaaatttaacaacatctaaaatactagattagtttcattaaatctaacattgaatatattttgataatatgtttattttgtgttaaaaatactattatatttttctataaacatcatcaaattaagtacaaattaaaatccatgtgctaccatggtagattatacatgcttagctactctactactccctctgttttatattataagtcgtttgattttttttctagccaaactttgttatgtttgactaaatttatagaaaaatttaacaacatctaaaatactagattagtttcattaaatctaacattgaatatattttgataatatgtttattttgtgttaaaaatactattatatttttctataaacttgatcaaagttaaagaagtttggctagaaaaaaaaagtccaacgatttacagtatggaactaagggagtagtagttagtagatggtacatctgatgttaatctcaatttttttcttgtttttttctcctaggatctctttagtggagggagtgagacatctgcaaccgtgatccaatgggccatgtcggagctcatgaagaatccaagggttatgcgaaaggtacaggctgagttgcgtgacaaactagcagggaagccaagggtgacagaggatgatttgtccgacctaaagtacttaaagctcgttattaaggagaccttaaggcttcaccctgcagcgcccttgcttgtcccgagacaatgccgtgagccgtgcaagatcatgggatatgatattccaaaaggtaccaccgtatttgttaatgcgtggctattggcagggatcctaattattgggatgatgctgaggtgtttaggctagagcggttcgcaaatagtaccatagacttcaaaggcatggacatggagttcataccattcggggcgggaaggaggatgtgctctggtctagcctttgcggaagctattatagatctactgttttctaccctgctcttccacttcgactgggagctcccttgcggaatgacagcaagtgagctggacatgatagaggagatggcccttactgttcggaggaagaacgaccttcacctccgccccatcctccgtgtgccgcaaactcaaacttcttctgcacttctattttgtgagagagctcaaacttcttctgtatttctgttttgaaagagagttcaaacttctgtttgttttgagagagtacttttgtttattttgttttgagagagagagagagcgcgcgcgctcaaacttcgtttgcacttttgttttgagagggggaatgcgcactttatttcggtaaataaaatgaatcacgacgtggtttcatcagaaaagaaataaggctataaacttcagtgtgaaattctacaagtcaaaaaaaaagttggtgcatctgcaagatccatttctgggacatgcgctctgactcactaaggcgatacagattattggaacaatagatttatgttctgaaacagggatgttagatttatgttttaaaaataggaagctagattatgcacttcgagaaatgcttacagttttttgcacgataaatacactaaatctttgtactcctgttgtaacaccttgactaccattaataaaatagttataaggtagagcccctctacctttttcagtcaaaaaataaataaatacactaaagctgagcagcaaattctgtacaatttttccaggttaacatatggataacatgatgagaatcaacagctctccgatgggaaactacagagaagagaaaaacagatataattcagcaaatctacatgtcgaaagctgaccaaaatcaagggcaacctggtatccgtccagaaagtaaaatccttcactatttctcacctctccaaaatcagcaacaattttacaggctttggatatcttcattaactccggtctgaaggagttttggagaatatgaattacaggcagctgcctaggttgtcagcaaatccgccactggctgactagagaaggggttttggatcacaaatttatcattttttttctaggatttcagcagatgcaatatatcatgtaaacagtaagaggcatatcaacatcgatgtctccctttcgcacttggagcagagcaatccaacagcaaacagggcgatgagacccaaagcaaaagaaatgaaaacgctaacaatttcagctgaatcttcacagcaactatctaaatgttgcaaaactgcaatatgatatacatttctgggttctgaagctatgcttggtgagcaacatctattccagcctcggtaatgagctgttctgtcaacgaaaagagcccggcaatttccttttcagcatcaagaatcatatccatttccttgtttggtttggtcttggaaacaattctagtactgtttacacttggcgatgcaaccagattgatgccagaatcagttttgccacttctcaggaatcccttagccatatctgcaagtttcttcaatgtagtagtagcagcaagtgcctccacctccgcagcttcagtttgaagattttggagccccatatgaacggaaaaatcagaaggtctcttgatgtcactaggatctttcaggaacccttccaacttgtctacctcctccttcacatcccaccttctcattaccgccttcagctcttgatctttcgcgtcaagtgcttcatgggcagctcttaaatccatgtccttctgatgcaaggattcttttaacatctctatgtcagcctccagttgattatgcttgtgcaaattggacttgagggctgtacctgtgctcgaaatctcatcatccagcaatgcataaatgtccatctcttcgccttctactgaactagcaagattgccagtgagttcagctatcttttgcaccacagattcagcttgtgagcaactgaatttcatgctatccaatttattctgtagtgtctgtatgtgttgttctttatcctgtaattcggttctaacctgaacaagttgatcttccttgctatctagcagctgctttagttcaacaacttcactgttcacttcagcaagtctgcgttgtgtttcagaaagctctgaatccttctcctgaacagctatttggatagattccacctttgatttcatatcttggacttcatttcgggcttctaacagctcagattcttttatttcaacaagctttaatgaattgctgtgctcattttccttctgaacgagcgccttttgaagcaactcaacttctttggttttctcttctaagctctctctttcttttgttaacactgcttccagagactcaaccttctccttttcctgaagtaacagtgattcaagttcatgacagcgagactgtgcagcattgagctcctttgccttgccttgaatctccaaccgagcagcttccaagttctggttgaaagatgaaagcaatagcctttgaccagagagttcttgaacttgtttctgcatctgcactgcttgatcttctatctgttttcgagaggaggagaaagcctcttttgaagcgattagttcagaccgtacagcatccagcagagacctcacacgtttgaagtcactgactgtatccttgataccatccatatccttgcatgctagttgcgccacttcctttaactctttctgtgctgctaaccatcccatattctgcctctcaagttcttgctcggcgatttttagtttctgttcattggcctttctcaattcattcgatctggaaaaatcaatttcttttcttttaatttcactccggagctccttaattgttgcttcttgctgctcagcagcctgattagcttcaagaagcagctgttccttggacttgatctctgaacgcatcaaggttacttcttcattcttcttcaacatatcttgcttaagcttttccacttcagttaccttctgagaaagcaaatcttgtgagctggcaattttcttgtcttgctcatcaacaagaagcttcaggttatcgatctgcctcacttgtaaaaccagatctctacttgccttacccagtgatctctccatttcctgttgccttgcatatgctctattgatcccacgctctctctgatcaagatccttcttcgcccggttcaggcgtacctgatcaactgaaacccgattctccgcatctcggagatccctctctttcttcctcaaggtagacaaggcggcctcaaattcagacttcagtacatcaatgctcatactcagctcactatcctgggaagcactggtatccaacctttgcgtcttcgcaaacagccgctccaatagctccctagctggttcagttgctccattctcgccatcagtgatatttgctctaatacctttaacaactgatttgatcaaatgaggagcacatctcatatgttgagcttgaaatgacaccatgaaactcaacttctgcctgaacagctcctgtcgggattgcagaaaacagtgtgcatcagtagactgctagaaaaaagttgcaacaggacacctcctagtgaacctatctgcaaaaatggggattttatttgtacatgaaaattctcccggtgaaccaaaggactgaaatgatatagtatgccaaagttaactctgaactaaaaattcagaactatatttattcacacatagtttcaatcttcagcaaagcgacatagcgcagcggatgaattttgatcccaaatctatcgccacacacaaactacaatcgctaatagttctcgttaggttctccgttatcaagattagtttaaagatgtaccggaattgaccaccgtcaaaccaatttcagccaaaaaactcctaattaaaaaactaccactaccaggcagcacaacttgaactagaaaaccaaaaaaaatccgatcctccgtccccttcaaaccgctagtagacgagctcggaatcggaaaccgaacgagaacacacaccaccaacaacgaacaacgagcaacgagagaggagatacgaggagatgggaagggatgctcacatgtgtgacggggcggcacgacggggagccgcagcggagaaccgccgccgccgtcgccggcggcgaggaggaaggggagaggggtggcatggcggcctagcacgtgggtgggggggagggagcggatcacggccgcccgcgcgagatcggacggctcacggcgcgcggagacgagagaggagaggagatgatgatgtggaggccgaaccggacgcgtgtggactgcagtgcagtgcagtggagtggggtggggtgtagtagatgattgatgactcgagtaagcgtgacacgtgacgctcgtgtcgcttgctctttttttttctttttcttttctttttgttttgtttgttttgatgggtttgtgttgcttgctgttctgggttctggtgccgtttcgtttttattcgggggtacgtgaggacaggaaatgctgggctgtactacgtgatgagagaaatttgaattcgaagatgtttaaagaaaccgaaaatttggaaggattttagtgggattgtcaccgttggatgggtgatgaagaaccctggccgttggatcaaaaccgcccgcggtccaccgtaggagttctaggtgggccttgtccttcatctgggcccaaaaacgggagcgcacctactcatctaggctgtgctcttttcagtgagttcctaactcacccccttgtttttagcatgcataaattctttgcaaaaagaaaagaaaatcttatgaaagttgcaaaaaggtgacatatttttgttctgctatttctgtcaaaggaagtaacaagtccagtctcttcaggagtagcaggtaaatagagatatctgagacataatttgctctctgaatgacaagttttgcatggatttgtttctgttcttcattttttttctgtttctggtgttcttagtttttcttcgcaccacatacagattctccgattctcatggtgtgcactgcaccatcctacactaaccctagcaagaatgaaatatgtatatcttgagaatcctttgtaaaagtgtaaaaccttattgtccctcgagaatctctatatcatcctgctatattaaaatattgtcccttagtcaccttcattctttcttttaaaaaatgtcagaaaaatggagttctacgtggtgaaaagatccttcctttcttggaatggctctggctcttcagtaccaacatgcatggtaactgcacatattttgcacataagagtatctctaacagcctctccaaatcgaactcctaaaacacccatatagccaactctccatctgatttagctagtcaaattaactgtatactccaacagcctctctattctaccctctctattttgactatgacaccgggacccatatgtgagccactcccttattctttctccccttccttcccctcttcctcttttcttttctagcgttgacaagaagcaggcggcggcagcaagcggggaggggacggcggtgaaggcagcgtcggcgggaggcggcgctgcgtggggaccggcgggctgcgcggcgggaggcgggcgccgtgcggaggcagcgggcggcgctgcgcggaggacggcgggcgcggcgagcttgtgccgcgcggaggccagcagccacggcgagcgggggcggcgggttgcgccgcgcgggggccggcggccgcgacgagcggccgcggcaagcggaggacggcagtcgcggcgagcggaggccggcggctgccgtgctcgagtttctccccatgcctcgtcgggctcctgtgcttggctgccgtgtggggatgaggaagatgggctctgtggggcccaccattggccagccaaataaagtgaccaaatttggctagtggagggagggttttggccagccgatagcttagccatccagttgaagaggctgttggagcacgtttttttggctagaattgctaaaatttggtttgaagagtgggatggagaggctgttggagaagctctaagtaaccgatgaaatactgagaatcacaacactgggaacaacatgttaactttggatcagcaccagatatgcagaattttacaagccatggtacaaccataccgaaaacagattgtaacaattaaccatacacacagataagtatatctgtgagatgacaagggaagcacccaaacctgccggtaaacaaggcataaacacgcatgcagaggtaaacacacaatgctccacggaaggaaaccaataactcctgctgatgaatgacagataacttataattctatgcatcaaactacctagctgaaggtactgtctcacttgaatcaactgcctcgtctattgtatctgcttttgagttcttctcttctgtgatgcagtctgaactatcaggatgagacgaatgagatgagtcctggaaggagctggtcagatcaggcttgaacatctcatcattctccaagttggaaagcttctcagcagattctcccttgagcagctcaacgacttcagacattatcggcctctgttcctgtttgttctgactgcatgcaagcccaacaagcaccattcgcttcagttcagcctcgacgaagacatccttgagctttggatcagcaatttccttgaactttttgtcacgggcaagtggaagtgcccactccgtgatagttagcttcgtagtggggtttagcttctcaactggcctctttccactggcaagctctagcagcagtactccaaagctgaagacatcacagctttcagaggccttcccaagcatggcgtattccggtgcaagataaccgagtgtacccttcacctttgtagtgacatgggttgcaccatctggaatgagctttgcaaaaccaaaatcggcaacccgtgcttggaaattcttgtccaacagaacattgcttgacttgatatcccgatgaatgatatgtggtgtcgcttggtgatgaagatatctgcatggtagagagagatttcagatgtaagattacttctgcatgtactgaaagttgtcatactgttacagcataatgaatatttcataaggatgtaaaacatgcttacgcaatcccttctgcagaatcaatagcgatcttcattcttcgttcccaaccaagatggcattcagctgcatgctgtccatgaaggtgggagtgcaagctcaggtttggcatataatcgtagactatcaggcgttcttggccttcggcacaatagccacgtaagctcaacaggctcttgtgtctcactgtcgccaaaacctccacctcaattgcaaattcagtttcagctttgttgctccaactcttgagccttttcaccgcaatctgtcccatgtagttaacagaagaagcgttaggttctggttaaagtgaactactttttcctgattttggattaaacagatagaaggtaaatagttccaacataatacttatgatttatgaaatgatgttcaaaaacatacttgtcaaaacgatagtttgaatttgatattgtaggggctgttcagattgatgctattttcaaccataccattttttggtaaagctgccaaaaaaatgtctatgtttagtttgttgtcaaatttggtaaatacataagaaatcctgccaaaattttagcaatattgtcatcttaaattttggcaacattgccatcttgctaaaattttggctacaatctgaataggcccgtatttttttttcaacccaaaatgaaacacaactcaccgggatgtagcagtttgggggttatatcaccatgcaacaaactaacaagtaccaatgtagaacagtttcatcatcttcataataaatgtgcaactgtctgatggaataagtcttacgctgttggtcttcttgtgctaattggtctttgtgttctttttgcttttcagtgcatctttcttttatgacagcatctcctttcacttttactttttagagtagcaagccagctataaatatatatcccaacccccctcccctgcgtgatggtatggcacttgtgagaaataaacagaaaattgccccaactctccttcttgagctcccctctgtcctcagtcggcagcaggaacaccggctgttcctacttatccctcttcccctgcgctgacgagcagcagctcctcaaaggcagtctcttccccacgcagcagcccctagtggcgtgccatgtccgcaggacagtctcagcgcttggtcgcctcgagcgcgcggctccggcaggaggccgagttcaccgcggcagaggaacgcgagcgagtggtggtagagaccgctgcgacggcagcgagggcgtcaaggctggcggcagcaaaattggcaacggtaagggcggaagtggaagcggcggcggcggcggcacgacagtagcaccaacagctctatctccgcctacggcagctccgatgatgagctgacgagggaggcagctcgtgagcgggcggagcagtgggcagctgcgcaaccccacgcgcgcaatggcggcagcttagattggcggggatgcatgtggcggcggcggcccagacgggcgtggacgcggcggcccggttgggtcgacggagatcgcagccgttgcaagtggcatggctctccctcaccggaccggtaccatggtcaccacaggatttaggccgtcatcagggaagtcggccctggcggtgtgtggcctaaaccctaccctcaccaagaccaactacgtcgagtgggccgtggtgatgaggataaggctccaggtgcgacacatgtgggagccagttcggcacggcgacgtcaactacgacgaggatcaacgggcgcccagaagcggactgccaaggaggcctgggacgccatcgctgcggcacgcatcggaagcgaccgcgctcgcaagtccacattgcaggcacttcgcaaggagtgggagaacctggccttcaagccaggtgaggatgttgatgactttgccctccgtctcaacactctgctgtagaagttggtgtcgtatggcgacgacacctacgatgaggagagagccgtcaagaagctcttccgctgcatcccagagaagtacaagcagattgctcgctcgatcgagtctctgttggacctctccacgatgtcgatcgaggaggcgataggtcgcctcaaggtcgtcgacagcgacgagccacagcctctctcgaggcttatcaccattggcaggaagcttcatctcactcgagagcagtgggaggcctgccagggtgacgggaagaagagggagtcctcttcctcgacaggccgcaagcgcggcaagggacacgtcctgcgaggacgcacccagggtggcgcccgcggaggcgcctaagccggcgcgagatgacgcctgccgcaactatggcaagtttggccattgggccaaagactgccgacagccacgacacggccaggccaacgtcgcacaggtggaggaggaggaagagtcggctctgctcctggcacacgcaagcatcgagctatctccagcggcaccggccgcagcggctttcctccaacttgatgagccgaaggtacgcgccttcctcggagatggctccagcaacgacaagactgatgagtggtacctcgataccggcgccacccatcacatgactgaccgacgggagttcttcaccgagcttgactccagcgtctgaggttccgtcaagtttgggggtcggctccatcaccttcaccgccaaatccctgtgctcaccggagtctactacatccccgctttgaggaactctatcatcagcgtgggacagctggatgagaaagattcatgcttgttggtcgagcacgaagtcatgaggatttgggattgccgtcgttgccttcttgccaaggtaacctaaggcaccaatcgactctacgtcttcaacgtgcaagtggcacaaccggcctgcctccacttcgaggccctgaagcggctcagtgccaaggagatggtgcgaggcctgccgtgccttgaccacgtgaagcagctctgcgacgtctgcgtgttaacaaagcagaggcggctcccctttccccagcagataagcttccgagccaaggagcggctcgagctcgtgcacggggacttgtgtggcccagtgacaccggccacaccaggaggacgacgttacttcatgctgctcgtcgacgacctctcccgcttcatgtgggtaatggttctcggcagcaagggagaggttgcggacgccattaggcgcgcgcaggctgctgcggaggcggactgcggcggcgaattcacggcggctgaattcgcatcgtactgcgctgatgagtgcattcagcaccactacttcgcgccgtacagcccgcagcagtacggcgtcgtcgagcggcacaaccagacggttgtagggatggctcgagcactcctcaagcagagggggatgccggccgttttctggggagaggcggtggtgacggctgtctacatcctcaaccgctcgactaccaaggcccgtacgaggcttggcatgggcgcaagccggcggtctcccacctgcagtttttcggctgcctcacgttcaccaaggagatcggccacatcggcaagctcgacgacaggagcaccccaggggtgttcatcggctaagcagagggctcgaaggcctaccgtattctcgacccagagacacagcgtatgcacacggcgtgcgacgtagtgttcgacgaaagacgagggtgggcataggacaaggcggtggacgacggctcgactccaacgtacgacttcactgttgagtacgtccacttcgagggagctgggggagtaggtagctcttattcactgagtgtgcctacctagcccccgagcctccaccgactccagcagcgacacgctctcgagctacgacttcggctgcaatgagttcttcgctgacaccatcacaaccggcgaccccacgcactccagcaccaacagccacccctccgggcacatccactccgacgccaggttgtgtcaagcacagcccggtggagttcgctactccgctctctcacgacgaggagcgcatcgacgcataccacgacagtgagccgctgcggtaccgtacgacgggagcctcagtctttcgcagaggccgagagacacgcagcatggcgtgccgtgatgtagtcggagatggacgcggttgaggaaaaccgcacctgggagcttgttaacctccctcgtggtcaccgcgcgatcacccttaagtgggtgttcaagctgaagagggatgaagccggagccatcgtcaagcacaaggctcgcttggtggcacgcggtttcgtgcagcaggaggggatgccttcgcccccgtggtgcgatccccggcaaggagggcaaggtgctcctccttgcgctggctgctcaggaaagctggtgcgttcatcacatgaacgtcaagtcagcgtttctgaacgacgacttgaaggaggaggtctacgtacaccagccgccaggatttgcgatccccgacaaggagggcaaggtgctactcctgcacatggctctctatggcttgtggcaggcaccgagggcgtggaataccaagttggattccacgctcaaggggatgggcttcgagcaaagcccgcacgaggtagccatcaaccggctgggcaatggaggaaatgtcctgctggtgggtgtctacgtcgacaacttggtaattaccggcaccaaggatgcggaggtggcggcgttcaaggaagagatgaaggccaccttccagatgagtgacctagggcctctcttcttctacctagggatcgaggtgcaccaggacgactccgggatcacgtttcgatagaccgcctacgccaagcgcatcgttgagctggctgggctcaccgattgcaacccagctcttactccgatggaggagagactgaagctgagccgcgacagcaggacagaggaggtggactctatgcagtatgggtgtcttgtggggagccttcgctaggctccccacacacggccgaacttggcattctccatcggctacgttagtcggttcatgcagcgaccgacgatggagcactagcaggctgtgaagaggatcatccgctacgttgcggggactctcgaccacggtctctactacccgaggtgtcctagaaaggcacacttcgtcgggtatagcaacagcgaccatgccggtgacatcgacagcgaccacgccggcgacatcgacaccagcaagagcacaagcgagattctcctcttcctcggcaagtgcctcgttaactggcattcggtcaagcagcaggtggtgaccctgtccagctacgaagcgagtacatagcggcctccagcgcttcgacccgctctggcttgcgcgactgcttggtgatctcttcggcagagacactggagcggtggagcttagggtggacagcaagttcgctctggccctagcaaagaaccccatttttcacgaacggagcaagcacatccgggtgaggtaccacttcatccgaggctgtttggaggaaggaagcatcaaggcgagctacatcaacaccacaccaaggactagcttgcggacctgctcaccaagccccttaggaggatcaagttccttgagctttgttctaggatcgggatggcccaactttcccacaagacgacgcacaagacttaggaggagaatgatgaaataagtcttgcgttgttggtcttcttgtgctgattggttttgtgttctttttgcttttcagcttttaggacaggactagcatctttcagtttgggatgcctgttaggacagcatctcctttcactttttagattagcaagccagctgtaaatatgtatcccaaccccccggatggtatggcatttgtgagaaataaacagaaaattgtcccaactctcttagcgccatcctctcgataagagtaaggattctgttactaacactatcattataatagtatttagtatatttttctttcatgtgtttaatcacgtaaacaagattaatccataaaaaagactatagctatcaagtattttacacgttacaggacaaaatcttgcctcatctttcacccaaatatcactatcagcatgctacttattttttctggctcctagtagactaggtgggacaaatacactgaagagaagcacaatagtcatctgtctttgtgaagacaatgtgattttcaatagcctcatattccggctgtatgctttcttttgtgttcataccttccaattatgattttttctagcttgtaatcatgcaatccttgacaagactattggtataagcgaaaaaaattgataactgaagctaagaataagtcagttgtctactcagaccaaatccccattagacacggccttaaaccgcacgcaggtccagtttggatggccatcatgttcaaagaatatctgaaggtagcttttaaaaaacggcaaccattttatactgctaattaataccactagacttttttttttcaagacgacctacacaagacaaaaaagtttctattgatatagcaggaaaaaattacaaggttaccactagaccatgaacaacgctagaagtggatgtcagttaaacaacaatcatcaacatcactgggtccctccaatgctttgccatttttctaatcaattagaaaaaaaaaagaagacaacaaactaaagtttgtgcagtgtggactgcatgattctcagatttcttcctgttctttttttctttttcaagattgaaagaggaacacctcacctgtgatccatcccagagctggccccagtagacgctgccaaacccaccctcaccaagcttgttgtcatagttgaaattgttcgtcgctgactgtagctccttcagcgagaagatccgccatgtcgtctccttcttcttcttcctccggccaggtagaaccctgagtatagaacaagcaaacagatcaacaaacgagcttcatttcctcttcaaactctcaagtacggactcttcttcccaaaaaaaagaattggcacatttttaacggattaattagatataagtttccactatgtcattctatttcagcttgctgaccaacaactgcaatccgagagcgaacagaaaaattccccaatacaagcagagaaaattccacgcatcatttggttcatccatccaatgaaaacaggtgaatgttgcggtgttgtatgctcgcatgattaatcagcaaatcacacacaaaaccacaaaacttgatcagcaactcaccatttccccaaacaaaaaccattttctgcttcaagacacttctcagctcccagcagaaaaaattctccccagaaaaaaaaagttcttcttagctaatcaatcgagtaatctgttttgagcaaacccatcgaatccaccaacagaactaatcacaaacaaaattgcaaatgtttaccgacgattccacccaacaagtcaaaaccacccccaccctcgtaagtcataacccacccaaatgagcaaatctcccctctccccccccccccccccccaaaaaaaaaaaaaaacacaccaaacaggcaaacagcacacacgaatcaatcctcaaatcgccagatatgcactcacccgtccacccccttgcagcaggaagcccaccccatcgccgccgacaccgccgcagccccccaaatcagcacgacacccctccctctccggagacctcccgccgcgcgaggcagccccgcttcctcccctcaccgccgccggcgaccgcgagacagctggttgaggagagagagagaggagaagacgaggagacccgcggcttcctcctctcgtggtggtggtggtggtggtggtgtcggctcgtcttctccacctcgcactactcgcgtcgtctcgtcaccgcgcggcgcacgcaaaggcaagctcgggggcgcggtcagctcacccacgtggggaccgaccgggcggggtgcgggtcggacacgtggcgggcggcgagtgggccgttttgaacccggtgaggtaacggtcgggtttggggtgtgggcggtaacgtcacgcggcgggtgaggggtcggggtcggggtggggtactggagtggctgacgtgcgggggccaccaccgggggcgatgatgacctggcagcttgaaggggtggggccctcggctgttggtgggatggctacgtttgaccaaaggaagattcctgtggcctgtgggtgagacttttgctgaggtttgtagtacttcctctgtcccaggaaacgcgtcgttctggcgatcgtcccatcgtcccagtaaacatgtcgttctgctgcttctgcattactctctccgtctcgaaaaaaaaaaaaaggcaaactttagatttctgtgtccaactttgactatctatcttatatgaattttttttataattcatattttcattgttgttagataataaaacatgattaatattttatgcgtgacttgtctttttaattttttttctaattttttcaaataagacgaacggtcaaacgttggacacggaaaccagagtttgtcttttttagacggagggagtacgaagtaggagtgtgcaagttaatgtggtttttcttgtggttttttaatgcgttttgtagtacagggaatagattttactaaattactaaactaatgcactaatgagactattaaagagctataggggtgtttatatcagggtgtaaagatttgacgtgtcacattgggtattatataggttgtttcatagagtgttcggcactaataaaaaaactaattatagaatccgtcagtacataatttattaagcctaattaatccgtcattaccaaatgtttactgtagcaccacattgtcaaatcatagagcaattagactcaaaagattcgtcttgcaaattagtcacaatatgtgcaattagttaaatttttagcttatatttaatactttatataggtattcaaacgttcgatgtgacggagtgaaaaattttagggtgggatctaaacagggccgtagtttttgaccaattcatttgagtactttgaatatttcaggcgttctactgttagtactcctgttgtcttggtttgtctcatttagtacgtgaatttttagtgcgccacaacttgatgaccacgaccgatttggtatcactatcacacactcgatgattatatgttggtgtttataccacgaccgatttggtattacttgctccgttttaaaataagaacattttgtcctcttttttccttaaaaaattaacttttaacaatcatggtatcgaagtttataaaaatagagaataattgcattcgaactaaataaagtaggagacaattacaatggaatttaataaagttggtataatttattctttttgcttttgtattgctaagcgtgggatatgggtgaaaaatgaacttattttgaggggatggaggccggcggggtaaaatatataggacactttggctttgcaaatttagaccgacgtgttgttttcaacaagtcaaacaagccaatgctagtaaaaggacagtggcatatccagctatggcgtatgcagaatgtgcgttgatatttaggacctattcagatttgaggaattttgtgggccaaaattttagaagaattgaaccgtttgctgtaaaattcatacgtttcgaaggagcatttataatttgatctcaaacaagggcgcaaaagttagagagactgctcaatgaaggcattttactttgtgttatcatactgtataaaaaccatccatgcgtaccaagcaaaaattttcacaatttgaccctttgcaaaaactattttacaaataaaccgtcaccaaaacttatttcaaaaataacccttggcgttgaactaagacatctcagtgctaaatagcgtggcgctgaatatgcgttggcaagccgacttagtcacccatccgcggtggcacggtattcaacgccagttgacatggcgctgaggtgtctaagttcagcgccaggtgatttagcgctgaccaaaagagtcaaatttgaaataagttttgacagcagttcatatgtaaaaaaagtttttgcaaagggtcaaattgtgaaaatttcaacgtaccaagggactaattattgcctactattttattatgggatttgcccatatatacatacccagagaagggaagacaaagatgcaataccaaacaataagataagaatggaaagagacaaatgcccctcacaaaatccacaagtgaatgccatcacagctggtagccccagaaggccagaacaggactcctgttggtctcattgaggttagctagccagccactatggagtggagtagtgtattatggagcatagtgacccatcactttaataagcaccggtgattggcacgcttcaatcatggctttgtatctttgtgcttgcaaaagtctcaagcaatcccaaagcaaagcagatggtaagatgttctgcaggaattttgtaatgtcatcatccaatggccatggctttggccccaattgacctgttctcacctctgcctgccctcatcacactaatttttttaaaagatgatcatcaaactaatttaatccactaccatcaattatagttgaaaaagaaagccaaattggaccattgctttaacccgaaaaagaaaactgaaccggtgcttcgctcgatctggtccaattcaaacactgtttatgtaatcgaaaattcgaaccgctctaaactatttgagttgggcaacttcattgtgaatcatgaattaaagtagagattttggaccggttggcatggaaaagagttgggctccacgtatatgaatgaaccaaagaaaagcccaacgaccagaacaccacaattttaaacctaaatcacttaaaatggcgcaagttcatggttgaaaaaaaaacatataaatgtcataccttatggcctaacttttttttttcaaaacacaattaaaatgcaagcttttacaacacaccctacgtccctacacatatgagcacctccgaaaaactaggacagtatatattgagattgacgaagtcatcacgggtgtttcgctgtcaacgttcaagtctaggaagctactctcacttctcggagtaacatatttttcttagacgtatacatagtatatgtgcactcctatttgtccatatttatttttcaaatttggtttcactctccagataggactcttgggcttgtttagaaggaaatggcccacgcaaatactggcccatcacgaggcccaaatctgcgtgtccaaggaggaggagagaagcagcaaagcccaacttcatctgcctcgtctcgtcctcaccccgcctcgccgcctcaaaccctctccccacctgcatcccctctcctccacggcggcggcggacaccaccgcacaatgaggagctcccctgcggcgagtggcaccacgccgtcgaacatggacagcgggagcgaatctgacagcgcccccgaggagctcaccgccgtccaggtacgcccctcctgcctacgagaggaagccgaggacgacggccgtcgcgcgagctagagctcagctaacccctgtatccgagcgaggcttcgtgtgcgtcgtgctgccatgcgctggatggatcatggatagcacctcgtttgctgcgcccgcgagagctgagaagcacaagtactagtttagtagtgagctagagctagggttgttggatgtttacttcgatctcaccttcgcgatgcctcgtcttggagatcttggagttcgtgctgaccgttgctcgctgttgatgcttcgtagggggttgagaagcacgacgagatcagtaaagttgagaaggacagtgccatcaggtgtgtgcccctttatccctttgttccttgcgtgtatgctaggcttgatgattggatggataagcactctgctgattgtgcttcccttattttgatttgtgttgttttagttagctacatgattatttaggtgattgatacttctattctatggagatgatctgtgtttgtgtttgtgatatatatcaatttgtatcttgtcttaatttctgcttgtttgcttgtcagtctcagaagatggtactacaactgaggttttgttttgttttagaactaaaactaaaagtatgttattctcgatgattatacaccacttatgcctagatgtaaactgtccatacatgcttctaggtggtctttcaatgtttgtggttccacatgtacatagcacatactgttctctgcagcaacctgaaaatatgagcattataattgatgttttgctttcccgttgtaacatccatgatccatgggaactgcctatctggatcccaaatgattttgtgagcatcacggtggtgtcactgtttctgctaattgtaagctgtagcttctctgacctaacatagtcatgtaatctcagagtatcgcagcaggagaaagagcggaggagaaggtgggcccaacgaagaacatcctcaaaaccagataaaaaggagcctctggaggtagaagataaagacatcaaacagaaggcagagaatgaagaagatgaggagagcgaggagacccatactatgcctggcatgctccctaccaatgttatcgaaatgcttgcagcacgtgagaagtatgtgtacttcccttgcaccgtattcagtttttttttgttttttttttttcaattttgcggacttaattggttactgtcgtccttttctccttcaggcaaaccttctcatctgactccgaggaagagataacaaatcagaaggttcagaaaaggaagaagcggttgaaatcttccgggtacttttttcatgtcttgcagtctcatatgaattatgtggaaatgttacttatgctagttcttttgccaatgtttgtcaggcctgaaacaattctgttgaaagacgttcgctcgacacagcatgtgaagaatgcccttgctttcctggagcaaaggaaaaaccaggtgccaagatccaatgcagttttaaagaacgcgaacaaagctttgcgcctcctttcatcgaagggcaattttttgagttgaatatggtaattgcgagagcaaaggattttctcaatttgctgttaggtatgtgcttcggaagacatttatgtttcagagggatggtcttttttgtgcttttatttgagatgaattggctttcacatcccaggcgcacaacgggcatatcgatgagcatgaaactgtacaatacgaatgtttgcaaatgtaatatgtatggtgcgtcagtatttgacaattctttgggcatgagtaatttcttatatggaatattattgttcattacttctttgctaaagaaaatgggaattgttcagttaaacccgttgacatgaattatttggaaacttagcaaccaatcaaatgaggatggcatggacatccggaggtttgcatccacatgatgttaattttacttctgacttcaattatttttcaactcgtgtaatattaatttgtactccatctgtccctaaatatttgatgccgttgacttttttaaagatgtttaactgttagttttattaaaaagtttaggtaattattaattcttttcctatcatttgatttattgttaaatatacttttatatatacatatagttttacatatttcacaaaagtttttgaataagacgaatagtcaaatatatttaaaaaagtcaacggcatcaaatatttagggacagatggagtaatattattgttgagcggtgttcgcctggtatgtgggcgcaggagttgcaaaccagcatcagtgtgtcacttaccttgtttgccgttgagcaaaatttgctaagatgaaaatcatatctgaaaaacccgtaattagctaccaaaatcttcagctcaatttccatttgtattatacagcatcaggatatattatgccggcggcggctagatgatgtctacaccgtagggttgcatgtgccggccgcaaccacccacaggttttatctgatgcggtgaaggtcagtgtgaggcaggcgccattgcaccgaccgaaacacacgaacagcgacaacagcaaacagatactagagcaaagcccccacaaatttaactagattggatatttagttatgctgtgtgttcaccaacaagcgcgggccgagcgacagagacatatgctatcctccaacagtagcatagctatgtactcgctccatttcagtttaaaagaggtttttgacttggctcacaatcaaactactttaagtttaactaaatttatagcaaaaagtagtaacattttaaacccaagataaatttattataaaaatatattcaattattgatttgatgaaactaagttagtatcgtaaatattactatatttatctataaacttagccaaacttaaaacagtttgactttgactaaagttaaaacgtcttataacctgaaacgaagagagtatttttaaaaccacaggaggggaaaagagaagattgagaaaatacgcaaaatgaggtgagccattagcacatgattaattgagtattaattattttaaactttaaaaataggttaataagattttttaaagcaaaattcattttttttaaaaaaacacaccgtttagtagttcaggaaacgtgtgtgcggaaaacgaaacaaactctctctctccggctgccgaaggcagcctaacaagtttgaatgtttattatccattttcagtttttttttaaacattaaggttttactacaccagcgaataatctttttataggtcgtataaattgataacctcatacataagtggatttgcgggttagccacttatgttcatcagtgaataatctttttatacatcgaataaattgataatccgatatataagtgaatttgtgggttagtcgttgggtgagccaccacccggctctgccactataaaatctcccgaggaagatgacgaggagtcagtcaacagttgactagctgttcgattcggccatggccaccgagctcactgagtacttgctgctcctgccgcttctcgtcgtaccgctcctctacctcgcggcgtcgtcgtcgcggaggtcggggaggctgcggctgccgccggggccgtgggcgctgccggtgatcggccacctgcaccacctcgccctcgccggcgcgcccacgcaccgcgccatgcgcgacatggcgcggcgccacggcccgctcatgctgctccgcttctgcgagctccccgtggtggtggcctcctcgccggacgccgcccgcgagatcatgaggacgcacgacgtcgcgttcgcgtcgcggccgatcgggccgatgctgcggctcgtgttccagggcgccgagggcgtgatcttcgcgccctacggcgacgggtggaggcagctccgcaagatctgcaccgtcgagctcctcagccaccgccgcgtccactccttccgccccgtccgcgcggacgagctcggccgcctcctccgcgccgtggcggatcaggccgcgtcgtcgtcgtcctcgccggtgaacctcaccgggatgatctccgccttcgtcgcggactccacggtgcgcgccatcatcggcagccggagcaggcaccgcgacacgttcctgcggctagtggaggacgggctcaagatcatgccggggatgagcttgccggacctgttcccctcgtcgcgcctcgccatgctcctcagccgcgtgcccgccaagatcgagcgccgccgccgcggcatgatgggcttcatcgacaccatcatccaggaacaccaggagagcagagccgccgccgaagacgaggaccttctcgacgtgctcttgaggctccagaaagacatggactcccagtatcccctcaccaccatgaacatcaaatccatcttgatcgtaagctctcctccccgaactccggctacttccccctcgtcaaaaacgaaatcctcttcatgtaattcgctcgaatccaggacatgttcggcgcgggcagcgagacgtcagcgacgacgctgcagtgggcgatggcggagctgatgcgtaacccggcggtgatgcgccgggcgcaggacgaggtgcggcgagagctcgccgtcgccggcaacgacagggtaaccgaggacaccctcccgagcctccactacctccggctggtcatcaaggagacgctccggctccacccgccggcgccgctgctcctgccgcgggagtgcggcggcgcgtgcaaggtgttcggctacgacgtgccggccggcacgatggtgctcgtgaacgcgtgggcgatcggccgggacgcggcggcgtggggcgccgcggcggaggagttctcgccggagaggttcgagcggtgcgagagggacttcaggggggcggacttcgagctcatcccgttcggcgccgggaggaggatctgccccggcatggcgttcgggctggcgcacgtcgagctcgcgctcgccgcgctgctgttccacttcgactggaggctgccgggagggatggccgccggcgagatggacatgacggaggcggccgggatcacggtgcgccgccgttcggacctactggtgttcgccgtgccccgtgtccccgtgccagcgcagtagacagctggtgttatcttatctaagccaatatgagtaatcgcaattaatggcagaatttaccgataatggccgtctttagattattttttttctaaaaaggtcacatcgaatgttggacacatgtatggagcattaaacatagaagaaaaaaatcaattgcatagtttgcatgtaaattgtgagacgaatcttttgagcctaaatataccatgatttgacaatgtgatgatacagtaaacatttaataataacagattaattaaacttaataaattcgtcctgcagtttacaagcgaaatctgtattttgttttgttattaaactatatttaatattttaaatgtgtgtacgaatacttaaaaagatttggcccagcaactaaacacagccaatttcatgtgagcagtagtcaaatggtctccttgattaccgtcattagtcaaaatcgcagttcacatcatcacatattcacatggcgcgaaagattacgacacgctaccaattaccaaacccccaaacactttcccccctcaaagccaaacaatgattgaggcagccatggccggcggcgccatgccgctggtcgtgctgctccttgccaccatcccgctcctgttcttcaccatcaagcgctcggcgcagcgtcgtggcggcggcggcggcggcgaggggaggctcccgccggggccgtgggcgctgcctgtcatcggccacctgcaccacctcgccggcgacctcccgcaccgcgccctgagcgccctggcgcggcgccacggcgcgctcatgctgctccgcctcggcgaggtccaggccgtggtcgcctcctccccggacgccgcccgcgatatcatgaggacccacgacgccgcgttcgcgtcgcggccgctgagcccgatgcagcagctcgcgtacggccgggacgccgagggcgtcatcttcgcgccctacggcgacgggtggcgccacctccgcaagatctgcaccgccgagctcctcagcgcccgccgcgtccagtccttccgccccgtccgcgaggccgagctcggccgcctcctccgctccgtggccgaagccacctcgtcttcctcctccgcctcgctggtcaacctcaccgagctgatctccgccttcgtcgccgactccacggtgcgcgccatcatcggcagccggttcgagcaccgcgacgcatacctgcggatgctccaggacgggctcaagatcgtccccgggatgacgctgccggacctcttcccgtcctcccgcctcgcgctgttcctcagccgcgttcccggccggatcgagcaccaccgccaagggatgcaacggttcatcgacgccatcatcgtcgagcaccaggagaagcgcgccgccgccgccgccaacgacgacgacgacgaagacgaagacttcctcgacgtgctcttgaagctccaaaaggagatgggctcccaacacccgctcaccacggctaacatcaaaaccgtcatgctggtaatcaagctctccctctctctatctcaaaaaccttcgtgttacttgcagagtccctgatcatggatcacttcccatgtttcatgatcctaggacatgttcggcgccggcagcgagtcgtcggcgacggtgctgcagtggacgatggcggagctgatgcgaaacccaagggtcatgcagaaggcacaagatgaggtccggcgagcactcgccgggcatgacaaggtgacagagccaaacttgaccaacctaccctacctacgactagtcatcaaggagacactccggctacacccacccgcgccattgctactgccacgcaaatgcggaagcacgtgcaagatacttggatttgacgtacctgagggggtcatggtgatcgtgaacgcgtgggcgattggtagggacctgacgtattgggataagcctgaggagttcgtgcctgagaggtttgaacacaacgggagggatttcaagggaatggacttcgagttcataccgtttggagctggacgaaggatatgccctggcatcacattcgggatggcgcatgttgagcttgttctctctgcacttctgtaccactttgactgggagcttccacaagggatggcggcaaaggatctagacatgacagaggattttggagtcacaacacaacggcggtctaacctcttggtgcgtccaatccatcgtgtatcggttccagtagagtaaacatacttgtaagatatatttataataaatgtaattgccaatgtacgtatattagtttcagtttaattttgtttttttataattggtaaaagtcgagtttgacattatatgtttgtggagtgatatatatatcatattaatttatttttattttttttataattatttaggtgacatgaaaaaagatataagaagatgtatcctcaagtgatgaaaatctctctccagatatacaatttctatgtatgtcattacttgttcaatcttctataactagggggcagataacttggttcatttgggctcattatcctctaattttcctcttgggtggtgcatcagtatattctccaatgttaatgttctctctgaaacctataaaacgttttgcactaatcagtaatcaagtataatcagttcggtttccgcattttgaaagaggcatgaataagttgtgtccagtgtggttttgacgtgagatgcacggacacagcgcacgcagaacatgtgcacatccgtgcagggcttcgtacttgtagaacgcaaacctgttcgtccatgtcgcgttctcccagacatccgagccgtgtcgatcgcgtgagctgccatggccggcgaactcgcgttctatctgctcctcgtaggtctcgttgccgtgccattgctcatcttgctcggctccgagcggcgcacggcggcgaggacgcggctgccgccggggccgtgggcgctgccggtggtcggccacctgcaccacctcgccggcgggctcccgccgcaccgcgccatgcgcgacctggcgcggcggcacggcccgctcatgctgctccggctcggcgaggtggaggccgtcgtggcgtcgtcgccggacgcggcgcgggagatcatgaggacgcacgacgttgcgttcgcgtcgcggccggtcgggcccatgtcgcggctctggttccagggcgccgacggcctcgtgttcgcgccctacggcgaggcgtggcgccggctgcggcgcgtctgcacccaggagctcctcagccaccgccgcgtccagtcgttccgccccgtccgcgaggacgagctcggccgcctcctccgcgccgtcgacgcggcggcggcggccgggacggcggtgaacctcacggcgatgatgtccacctacgtcgccgactccacggtgcgcgccatcatcggcagccgccggctcaaggaccgcgacgcgttcctccggatgctcgacgagctgttcaccatcatgcccgggatgagcctcccggacctcttcccgtcgtcgcgcctcgccatgctcgtcagccgcgctcccggccggatcatgcgctaccgccgccgcatgcgccggatcatggacagcatcatccacgagcaccaggagaggagagccgccgccgacgccgccggtgacgacgacgacgacgacgacgaggacttggtcgacgtcctcctcaggctgcagaaggaagtgggcgcgcagtatcctctcaccaccgagaacatcaaaaccgtcatgatggtaagctcgacgccgccatggccgaacaccgaaagctcgacgcgcgcgccaaagatgtctccaccatttttctccctcgcttctttcacaggacatatttggcgccgccagcgagacgtcgtcgactacgctggagtgggtgatggcggagctgatgcggagcccgagcgccatgcgtaaggcgcaggacgaggtccggcgagccctcgccgccggcgccgccggccacgacacggtgaccgaggacatcctacccaacctcagctacctcaagctcgtcgtcaaggagacgctccggctgcacccgccggcgccgctgctggcgccgcgccggtgcgacagcccgcgcgaggtgctggtgctcggccacgacgtgccggcgggcgccacggtgctcgtgaacgcgtgggcgatcggccgggacacggcggcgtggggcggcgcggcggaggagttctcgccggagaggttcgagcggtgcgagagggacttcaggggggcggacttcgagctcatcccgttcggcgccggccggcggatgtgccccggcatggcgttcgggctggtgcacgtcgagctcgcgctcgccgcgctgctgttccacttcgactggagcctccccggcggcatggccgccgacgagctcgacatggcggagagctccgggctcaccacgcgacgccggcttcccctcctcgtggttgcacggcctcatgccgctctccccactaagtactgtaattaattatcaccaccatcaaatcatcagaatctaaaccaaaatatcttaagagttaagatgaaagcaaaccttaaccaaaagattaatttatcatcatgcccatgaacattggcatcagtaactgtaagttgatgaatggttcatatttgatacatatttccttttgttgactacttggatgagattctgaatctttttgtagacattttttgctgttgaaataactacacttttgacttgttgttcatggatggcatcgatattttctatctgaagaagactaaacctgatgctttacagtaagctgcactggacggcgaatactaatcccttatctcaacaatggtagagcaggtacaatagcaggctataaaccagctataaacatattttaaaaagataaagaaaaatagagaaaagtagcgggctatagatctgtagccagctgcagcacggactccaagacgtaatgtgtgtatgacaggtaagattaggtattaatagtatagtaaacaattgtatgaattggttattacattagctataaatgatttggagttagtattgggctatattattaaacttgctcttaatagcttatctactgcttgaccatggagtacgtcacagttgctgtcacatgaatacttttaacttttcttgcttgaaatttccaagctgaaagaaactcttacaaatagaaaccctagtgttttttttttaaaaaaacagattgctcaagtgagttcttacatttttttatttaaaaaaattcacttataaatagattggtagccaagttaagaccaaacagtagtagcaactagcaaaggcagctcagctcaagtttagagtgagaggtgagagctcagcggcgcgccatggcggcatctcggcttgcgctcctcctcctcgtcctcgccgtcgccgcggcgcgccacgcgctcccggcggcggggagcgacgcgcacccggggtacgacggcgcggaggacacctgcggggtcccggcggcggcggcggcggcggggaggatggaggagtacggcggcgggcggatcctggacatcacccacgcgtaccgggcggacctgccggcgttcgcgccgggggcggtgacggggccggtggtgcggctcagggactccatggcgaacgggacgctctacaacctgtcggagctcaagatggagtgccacatgggcacccacgtcgacgcgccgggccacatgaaccagggccacttcgccgccggcctcgacgtcgacaagctcgacctcgacctcctcaacggtacgccctcgccgccgccgccgccgccgccactttacttgttccccttcctgctcgcgcggcgacatggtcgaggttttgtgtggtgcacgtgatgccaccgatgccggctgcggtatccgtaaaggagattagtacagggggaatttgggataaatttggagatgaactcgaagacgagatggggaactatagataactattttgttctgctacctgcagcgctagatcagatcctctaccttaagtcacatgaatttattactaacatagtgacatgtgtgtccaataggtaattgttagtgacaaaggcacggtgacgactttaaaggtagatgatctcagtccgtacccaatacgtaatttgcacttacatatatatgtttttttttaaaaaagagaggcaaacttgctaaaatatgtttccacaaaaggtgtggagaaatactacgatttgtatagttcacaaataggataaatggtacttatagtacatatatcgctcaaaatatcaaatacttcctccgtttcacaatctaagtcattctagcatttccctgtctagattcattaacatcaatataaatgtgggaaatgctagaatgacttacattgtgaaacagagggagtacttctcaactttagtatgtgctaatacattaacatgttttacgtatctacgtgtacatttttctcagaattttgtaaagttcacacattataaaatttttaaatgggtgtagctattcctagatccagaaagaaaaaggctatgggtacagaactcatacagatgctgatgtggcatgccacgagtaaaccaagatttcttgtaactcccatatagtaaaatcaaacagttgagagctttgtttataagagttatgtaagatgtttttagttacaaacttacaatagtgaattgtccagtttgggagcagttctttacttttttttttgacgcaagttctttacatcgatatgaatctaagttaattgtctcctgtgcttctcctgtatacgtctatcgctctctgattacagttttgcctgagtggaaaaccaattctgtttggtttggcgtctagacgtttgtttggaattggaccccacctaactacatcaaaagttctcatcacaccctactcatttagtcattttgttattgcaaccaaatcgggtgtgtgctacatgcctacaattttttaaaataatttgaaacctagttggtgctctgtgtctgtcctttctcctaccaatcattaagatgagcatagaagccaaacctgtctttctgattttgcacgatctccctttgcatactgacagctgacaggatcaagtgaattagacagctccatttcagtgttaggtgctagtattagtctgccattgttccagttgcttctctcatgcagagttgcagagcacagcttcttgtcctgctgcttgcaaagatcaatttttcgttggctttgttccagcattgaagattcacctgatatgatttgatcaacaaaattaacagtttagctgaagaaatgttgtgaaatacttaatagtagctgtgaaatgcctattcaacaattctttcgaagtgcactctctgtaatgtaatgcattcctaaggaaattgcaaatgaaacttgagtgaaaatttgtcaggtagttatagatatttgaagttccccgcaaaaaaaaaaagaagttgatcgatttcctctttgctggacaggtcctacattattggttgatactccaagaaacacaaatataacaggtactattatgtatacttttcttttttccaaggagctacctgctctatcacgaatataattaataattatatgatatatctgatgaatttaccacattcagcagtgctgcccatgcccccatggtcccacagatatgacaaaaacatgaatatcacttctatgtcttgtatataaaatgcatcactgtttgcatgcactttctttatacagctaaagcaatggagtcgttaaatataccaaaaggtgttcgtcgagttcttttcaggacattgaacacagataggtatgtactcttttctggacatatattcatgcataatattcacaccttttcccatagtgcaggctcagtttttagaacaagtggtccgttgtccatatgctcattttcagcatttctcttttgcatctttacaatacagatatcattagttcatctatataaccaattaaactgtaagcaaatgatttgcaggaagctcatgtggaagaagggaggtgatctgagttatgtcggattcacagaagatggcgcacagtggttagttgacaacactgacatcaagctagttggtatgtaattctgagatatcttacacttaacagtggtattgataacttctttttccttgatcaagctagtattaagttacatttatggcctttttgtcggtgataaagatatgtatgcatttatcatttttttttgtttgatgagaatttaatgctatgctattggccgattggctactctgcaggtattgactatctatcagttgcagcatatgatcacttgatcactgcccatgtggtctttttcaaattcccggtacgacgctatccttgttctatttcagtacatctgtaaattggtcattctcacttctttaatctacttcaaaacaaatccttgacaaacattacagagctgagtactgactaaatagttacttcctccgtttcataatgtaagactttctaacattgtgcacattcatataaatgctaatgaatctagacacacatatatacctaaattcattagcatagacatgaatgtaggtaatactagaaagttttactccctctatttcacaatgtaagtcattctagcatttcccacattcaaattgatgtatatgcctagattcattaacatcaatatgaatatgagaaatggtagaatgacttacatcgtgaaacggagaaagtacattataaaacggagggagtaactttgaaagcatgccattgctgcattacttactgacaagttttgggacagtgcttgctttactctgttttgatgttgctgcaaagaatgtttacaccttcatgaatgggtgatttagagcacgatgaatctagcatgcaagattatattactggctgtaaccattggttgatttgctgaatttgttctttcagaatatcatcctagtcgaaggcctgaagctagacgatgtcaaggctggaatctacatgctgcattgcttacctctgaggctggttggatccgagggctcaccaatcaggtgcatcctgatcaagtgattgcttcatcactgctcctgataatggcgacactgcagatcatgccatctgatgctgctacatcctggctgaggccttgagagtgccaaggccagctcagtagaaaaacaataataagtgtaaacgtatatatatcgtttgtttgatcagtaataattcaataaagcacttaaagtaatttttcatgtaaaaatgcagcagatattaggaatgtggtgaaagaaactgacagactagtaatccctttgttctcaaatacgaggcgtattagctttttacatggtctacaatttgaccgtttatttatatcataatatattatcaactaatgcggaattaacatcatataaaaatattttttaaatacggatctaataacgctacatgtatgacgtcaaacctatgttactaatttaattattagtaaaaaaattcaatgttaaactttccaaaaaataagagtattttataactgatggtgtaacagttattgagctggtttagtacctatctctactattataaaaattgaagatgtttccgcggtccgtcatcatgtttgagtcggttttaattttatgttttagttttaatctatatttcttctctactattataaaaattgaaaatgtttttaccggtattttggtacgtcatccgtatatgagttggtttttaagttcgtttgcttttggaaatacatatccgtatttgagtcggtttctaagatcgttcacttttggtaatacagaaggaatcatataataaatctgtttaaaaaactcgcatgctaacttgagatgatcggattcctaaccacagctcatgattttctatatatatatatatatatatatatatatatatatatatatatatatatatatatatatatatatccaaacgaactcctacagtaaatttcgtcttaactaaaccatataataataataagattaaaatagttttcacccgttgcaacgcacgggtatttttttctagttaagtataagagtcaaagattagtgttatcattggttacggcatggtacgggacttattgtcgaggtctagtaatgaaaactgcttgatatatcaaacaactttactactgtatttctcttttcaatacagctcgaatcttaataaaaacatacaaaatgactcaggatgtaagtgcacatgcatttgcagcgtcaaattcctcttcaactctacaaatacacacacattattactgacgagagtggaacatacagattaatattaataagaggaattgcacaatggactaggctttttttttctttaccacagttgaataatgggccatatatttacttcatgttttcacttaggactaggttttctcacactttattctcattggactagtttagacttggatctttttttctcatcgatgctgtccatccacaactcgaagcttgaccatgaccatatgcaattgagtctcttggtggcatcctacaggactttgcgtaacaccacattcaccttaggagaatgggcataaggtatagggctgacggataggccggccgacaacgatcatctcgagccacgggttcaaagtgtcaagtttggtaacaaaccatgattcaacgcaaatggttttctaaaaactagtctaatatgctacttagataataaaacatgacccagagtgaaatttggtcataataatatactccctccatcctaaaatataagcatttttactatagtgacgagtcaaacgtttttaactttatctattaatagaaaaaaaatattaatcacgtaaaattgatattattagatttatcattagacaaactataataatatgtaactctttttatttaaaacatcttacttttatagatattgttggtcaaagtagtatcacaaaaaccgtgtcacagtccaaaatgcttatattgtgggacggatggagtaaatgtaaacttatatatgttgtcggtcagcaaaattccaataaagcaaaagtcttttcaatttttcatctacaatgaaaaatgcagcagatacgaggagtggtaaaagaactagtaataacactctagtagtagctgctgcggaatgagttggcggctcagggtgtaacccatttataggtcaaaataagtggactcgcggcgcttattttagcatataagtaggtttcgcgggttagacacttacaatccttagcggccttcttcagagtcatagcaaaaggtttgtttgtgtggagagatgttatacaatttatggatatcttcacagtcatagcaaaatgtgaggtaaaggatgaagaaacctccttttgggggtgatgtatggaatagcatagtcagatcaatctctttcccaagagcatattcttttgtttccaacgaaaatgattcagtttgcatcgcaagtttaaaagacatatctcaaaccttcattctccactttataagaacatgcttatcaggaatatatccaaatgttctgaattacttgcatctataggaattcagtgccccttcagtcaatgattgttggttgaaacctgtaataaattgggattcgtctttaagctttgaagaaattctacatcaaggcagccaagatgtcacatgcttcttctcactctgttgaaaaggtcctatatgcaacatggaacatatggaatggaagcaaaggaatggccatattattcctattttggaatagaagaccctctttgttttcttggaagtcctcttaaaagtgaatactcctctcttactacatcgtgtaaatcattacgagagatcagctttatgtgattggatagacatgctgtaaattgttcttttaatttttaatatattgaaccgtacagtgtttctgctaaaaaataaaataaaatgaagaataaattacactgtgaactatcttttattaccaaagtttcattctagaccatcttttatttttttttcacttttcgctaggtatttttggttttttattttactttaaccacccaaactttcttgttttgataaatacatttgagagatccaagaaatactgtagaagaaagttttttaaggaaattaatttttagagacataaagcaaataatccgcaacaataatctagcgaagtagctaaacagaacatagccttaattcacgactagacatttctaaatatgagagctttcttagagggttcccaattagtataggaataaaaagatcaattgatcgatgtagttgcttctttaatcgtatgaatgaaaaaaaaatgtggataaaacttttatatgttattagcagtttaaaagccaaatgctggaaatagagcacgatgaaaaaaaaaacaaaatcaactctaaacttaagtttcagctgataaattaagtttcgaggttgccactctcaagatctgatccaagggatcaaagatgtagtaataaatgtttcatccttgtttcatcaagttctacggagtactagcaagggtcagccacagatataaagaaatgaagtgccggggaaaatagaagtccatagatcgcatggtgcatggtgaaattaacccctgaaagtttgctgatcacaacaatattctactcctacttggttcagttctctgtcttgttagtaacatcgtacattactttacatgagtaagaaatgggcagatccgtaaaggataccgtatcacaggcaaactagaaaacgcagcttacaaagagtgcaatatggcggaaaaacaaaactattcttgaaagaatgaactaatcagtctattacctagcaactccattttgatgatttatggtcgatggtcgccaacttctctgatgcagatgctcaagatgacacctacgcacaatgatccatccagttgctgatatatgagcataagaatgaatgcatgttcagtagagcaccggatagttgtcagactccgcatcatattcatacggataaggctttcatgtttgtatctgcccagacttggatggttgaatttagtacttgatcacatgatgtcgcaaccatagttcatacataaccatgtggaacgcgtcgtaaggaagaggaggtgaatgccacacaaagtgtttctgtacctgcaatcccaattaaacatgttacagtatagtaccgcactgctgaaacttcagtgcctctaaacaatggctgaatcaaattatttacacgcaaacagacctgagggcagctaatgttctgaacaagacaagtgacacattacaatcttgaccaagtagcttatttgtactatgaatgtgatctactatatttattttccattacagttaagtacaacgctgaattacatgcttccttttgtaaataattcggcggcttcatagaaaaaaaggagggtcaagagttgcaaacctgaacaagagatttgtgcaattcaacaaactcttcctgtgatatagatttaagtatactttttagttgatatacatcacgctccttaagtacaacagcaaattttctccagtctaggatatcattgaaaggcaaatcgtagtagtctgacaaaataactaaaaggatgaaacaaaatggattagaactcaataatcagaagggtactgaaaatatcagttcccgtgaaataggaaaaacagcataagtagagtggcatgtattatgaatgtcactgggtagaaatactaaccaggaacacaaccgtagtgtattgaatcagatatacgggcactattaacttgagagccaccaggacaaatacagaactttgtgtggtagaactgcttctggtaaaccagctctccaatagctctactgatccgattgttactgatagcaagctctgtatcattctcccagacttgtgccaaaatgactcttattttagaattgcgatggccagcccaaaatccaaggattgtcctgttgccatggcaaaagcaacaaaagacaaattttgtaggagtgcaaatagatgttcaaaccatagcatcgtcacaaatttatggtcatgacaactttcattttgctacaaggtgattcgttgcacatgaacaaagtgctgaactaaatgtaaaaccatgtagtcttctgaattaatcataggttgtaagattcaaggcatgatcaacaagataaccacgtgagtaagtgtgagtgttttacagaatttctcaagtaaacagatatttttcacttgaaggcactattactagaaaagtctagaatcatacatggaggcacacatatatagtcagtctaggaaaaagaatcattcagaagtcccaaatgaacaatttttttatgaagacaaccatagaagaatataagatcacatatatagcataagaagcagtaagtgtcattccaacctgttctcaacatcatttcctccttcaggcagagcaaatggctgcaatacttgaggaagagcgatatccttatgcggtataaagtcaacattatagcttggagaacagacaactctaatagaattcttcaccatgaatggaagtccttcaaaagccctaacacctacatcatggcaggtgacaaagaaatggtccgctccaagtgtcctgttccagtaaggatacttgtttatcaagccttccacataatccttaactattattgtcatgttctcatatgaagtaccctgcaaagacagacatatgcacgtcaacaattataaaagatcaattacaaaagatatggacaaccaacatacaatttcagtcacatctaataacaggaaattcgttcctgtatcagatgaaaagaaaaatgcatttcaatgtttgtaagccgacaaatttccgaaaccaaagatcttgcaccagactatactgctgactagaaacctatcggcacatctacaatatcgttctactttcgcttcaataatgacatgcaggtataaacaacacattaactaatactactttgagaaccgttactatcccaaattcacagtgcaatgttccagctataggctgaagaaaggaattttacatcataaagcgcattctactattaataaattcatttgccgattgccccaaccacacagcaaccgagcaatactcaatgcaccaaaacggtgatgccatcctaacacgacaattaggccctgtttgatttagattattgagtggaatgttgtcacggattatctacttgattataggagtaaatcgaatattatattaagaaataaacttaacaaaatagcttgaaacaagtgatctaaagttctaaaccatacaatacagtagacgatattttttttttgagaaaacgtatttctcgaagcatggagcaaacaatctgtttcaataatccgatgaacgagctgaaaagaacatggccttacaatgctatggaagtgtaaatagaagtagagcggagaatggaccttgccgcgcatcttgtggggggagatggggacgaagaagaggtgcgccttgtcggggtcgccggtgcggaagcggctctcgcggatgttctggaagaagtagccctcgctggcgtacttccccgtgagcttccgcggcgtctggtagaacgtcttggggtcgccgtccgggtacatgtacaccttgaagctccgctccatctccgcgtaccccgccgcgaaggcctcggcggagtggtacaccgacggccgcgcgaaggaggaagggcgggagccgccgatggcgagggagggtggggccgcggcggggcggagcgagcggagggagaggaaggtgagggagaatagggcgagggcggcgagtagcaggagcgctcgggggaggggcgccgcggcggcggaggcggcgccggggaggcggccggccatcgccggagttggggggaggggaggctggaagagtgatgcgagggtggatcggaagggtgtgggaagttgagggtgttaagtgtaaaatcagcgttaagaatgacatgagattgaagggacattaggccctctttgtttagggttataagccaacttataagccgaaaagtctaagaccctttttctttcagcttaagattattataatctagattattgagtcagattactataagctagattgttataatctgtagtagaataagcggttagttgtttcttttctagattattagagcctagattattgggtttgcaagtctaaagagggagtggagtggcatggtgagtaatttttcacccaataatctggaaaaagctcacctaaatgagcttatcagattataataagctggactccagattataataagctgcttcaataagttgtatgtttctttcagcttactcccaataatctggattataataatctcaagctgaaagaaacagggcctaagcctgaacaaacaaatagttttttcgtttgtcttttttgaagccataagccactctaacactattaagccaaaagctaggttggagaagctttttttggcttacgtgaggtagatgcatgactccaccattaaacttaagacattaaatccaccagcttataatatataaatcatataagcaaataagctgacttaaaaatctaagccaataagcctaagcctaaacaaatagggcataattatttgtcacgtgccaattaatgatttgccactcgatatcgatatctatgatatgtgggtctagtggcaaattctttagaaccactcgtaaaagtggcaaaacgttaattattccaggatttgaaaacatgaattaaagatggttcaatcatgtttcaaaactcatacatatatgctcgtgaggatccatatagtatttgggaaaaggaacaacaatgtttactatttggcacattcacagattcactatccaactacgtgtgacgacgatcatttctctttgctcgtctcctatatttcttcattcgagatggttgtagcttgcatcaacgaagtaacccacgttatcatggatgacattgccatacggtgttgtgctctgatcattcaacaactttgatataaacaccaactccaatagtagtagggtattgagctaggatggagatcctctatcttaagtcacatgattttgagtcattgacatgtggaacttttttgatatggatctacatttcagtaatcctaaagtcacgtgatttaaggtagatgattgctatatgtggcggatgccggatggccttgagctcaagtccgaagaatagtgagcagctacaagcgaacataatagtgagcactaagcagtgagccatgcaagcaaggtgagctaacaatacgttatcccaattaattgcactgtaagctccatttatatatccatataagcaattaatacttactttcattggactgataatactcatcgagccatcgttttggacaagaacatgatctccaaaaatatcaataaatatataatgctattgaagtggagtaccttttaagagtaatctatgtatataatctccgtaattctaagataaatattttagaaattattcatattcaaagattttatagtttacaatcggccttgttaaaaacgacaagtattatcaggcctaaggtagtgatacaattaaaatatgttatatttgtaattagctggaaagataagactgacatgtgtcgtgcagatggtttgcttcaggctggaacagattagttttaaaaccacgtgcattcaccaccccctcttctttttctcatttggagaaccgtggagcactggggaagaaataaatttgcagattgattctatctagtaaaggcgaagataaaatcagtaacaatatggccaaagttccctgccagcaattaccacccaggaggccaggacagaattgaacataaaaggtaacaaaaaaaaacaactacataggagtatatcctaaaattatagccatcaatatatattgctcctatactactagtagtacaatgcatgatgtatccatgtttcagtaaataatttgaccactgtatccaaaggagccagaagctgggaaaagatcgagtaaaacagtttcagaagaatggcagttctatacttctatacaagctttctgaaccaatatacttctacatttcatagctcttcagaagctagcatacaaataaggaaaataatatataaaattgtacattaggggaaaagggtatgttagtgtgcatgcaagcctatgttcagatataagattcatggatgtgtctgaactcagaagaggactgagttggcatgcgtcgcaacatgcaatattgcaaatgaagtatcaccacattcagttactggagttgcgacgactgaggtagaagaacaatgcagtacatgcggctgctgcataagggaacacggtccacatgccctggtttcaaagcaaagcataatttgattagaaaaggtaaacaaagattttactctcaatttttcaggagaggggaggagatttaccacagctgccgcaacacttgcgagtgcaacaacaggccgttctctcaggaaaaacccaacagctagctgcaatgagacatcattagtgtcagctgtcgtaaatacagattgaagaattcttattcatgtatttaattcgattgatctgtaagatgtttgaatataacaatggtgtcagcctacagattaacaaggataaacattgtattgtaagacaaaacatttttttagttgccacaactgcattggaggaacatagaaataatttgcagattgattctatctagtaaaggtgaagataaaatcagcaacaatatggccaaagttccctgccagcaattaccacccaggaggccaggacagaattgaacataaaaggtaacaaaaaaaaaacaactacataggagtatatcctaaaattatagccatcacgccaagtagtaagtctctataaagttagatcaaacgtcctgagcaagtgacaactcagtaacttcagaagtaacagaaaattaaaatccaaattacctggataggaagagtaaatagacaaccacagcaaactccagcaaaataacagtctgctggtatgccctgtttgtaatcgtcagttaaaatatcgggtttatcagaaatttctgacagaatcactgtgagtgaagcctgggaaaatgactaaccaatgcgccagctagaaatcctgtaggattgcgaaccccaactgaaaatcgctcaactgcaccaaacatcacagatattagtgacttctcactgtcagtgattaatgaatgtaacccactggtgttgtttctggatgcactaagtgcagcactataatctggcatttcaggaaaatgctccttactcagatataaactcttgagaaattataatctcagatatataccaaatccaattaggttgccatacttttgcaccgcacgcgatatgcttagtgctttctccttcccaattccaatctaaaaacagatgtgcaaattatatctcattcagagtgaagaatactctttcagtctgttattctttaccaaaattatgaaactatgatataagtaaaaatggcaaataaatccctgctttataccttgctgcttatgtcttcagatgctcttgtttgcctaaaaagtttacctagatagaatggaaccatatcactaatacaaacgcccctgaatggaaggatgggtcaggtaacaaaagatggtccatgattaattgatgatcgattgactgacaaaaaggaactgtgcacgcaccagtaaacccataacactgtggaaattatataagatgcattcattgagaatgaattagcaagagactgccaggttccatccaaacaaaggctgcgtgctaaagaaatcccaacctacatcaagaaaaaaagtaatcatgttcttaacatgcaacaatcaattacgcagtgaacataaaagtttgcagtaagttattgaaacttagttgggcatggtcacagtgaagatgccagtacagaggacagacccaaacatttaaagcttcttcactaataaatagtccaaatccagcagccatgagcaaccaaaagtaaacccacctgaagaaatttattagcaattcgttatattttaaaaagttttggaaactcttttagtgtgactatggtacatgtgtatataaatgattcattttacatatttttcaccatccaccattaatcatcatatatgttgcaatggtgcaaggtggtaatcttaggtagttaggacaaaaaaaaaatccttggtagttggaaattatccccaaaagcatatgtatctagcatgtagtttccactcacaaataaattcacaatctgatataacagccaaaattatggatgctcatggagaatggaatattaaaatccaggaatcaacaatgtatttgtctttgtcttacttcagcagcacatatgcatttttttttttttgccgggttagcacatatgcatttcaggagtaatatgcaacaacacaatgttttaactgtgagtgaaacagaaagataacccataaaattgtgaaatgcacataccctggagtatattccggaacaataactttcttcccaaacagcgaaaaagtatatccgatggtcgctgccgcatccggcggcgccgaagcatcaacaatctgtggcaaactgaaagatggacctgaagaaggctgcctcatgaagagtgaaatcacagtagcagtagctgccacacccagagcaagtgccactttagcaaggaaagaagcagcagtgctgcttgatttcacttccattgcatcgattatctcgctctcatcttccccaccaccagaagaagattcagccccggaggccgatgcccttgcagcgcaggaatccatacgggagaaattacgcgaactgtttgtatttgcgagaattatcagatgaggaatttcgcaattgcgcagataattactgaaaattccaccaggcaattcaacaatttaatcctgatcctatcagaagcggttccacggagagagagagagagaaaaaaaaacccaacctcgtaatgcgaccgcgagcggcggaacggcgtgcgccggcggagaaggtggcgcggcggcggaggcgagggagagggagcggtggcggggagccgaagcggccggcgaccgtcgccatgggaggagacggcggcggcgacggccggcgagagtgtctcggtgtcgccgccgtatgtttgtgtggcgccaagcgggttgcttcgttggcacgaccgcacgagaggatgatgggctagaaatggaatatgccaagatgccatccaattcgaatttcatttttgtatttttttaaaaatttaattatcggtttatgaatttaagaataccatatttaaatcatttaaatatacgattagtggtcgaaatttaataaaaaaatagaatttaaaaaaggtgaatcatgccccatcagttgcactaataagctaaaaccaaagctaaaatttaaattttaagttgaagatattttaaggcactttctttttcagaattgtatttttagttactaataacacaatttttaaaggttttacttatgcattaattattatgtcttaataagttgttttggtttattaggggatatgggtaaccgataatgctagagacaggttggtgcactgatgagtgaattttactgttttcttccatttttttctgaagaatttaaatattttgttaattgcaaacgatcaagttttggtgcattttttgatatatatctctatctatctatgtgcaggttcatatacacatataatctatttagagaacattatgttacacagtacaaagtaggatacgaggagagaaaaacgcagagaaaacatctgttagtacaatgccatccatcaagatcgtcgtcaatggaagccatgagatggcagcagtatcagaaacagggaagcgacggcggcggccagcacacggcagccaccggcgccggcgctggatctcgccgccgccgccgagctgctgctgtcggtgggcttcgccgccgtcgccgcctcttccggtgggctggcaatggcgacaggcggcaacggcgggtccagcacgtcgcccggctccagcaccggcgccggcggcagcgccggcggcagcgcccccggcgctgccaggtgcaccagcgcgccggcgtccgccggcaggatcgcgtagctcaggttcaggctcagatcgctgcacggactccctgcaattcacacagagaagttaaaatttagagcaaatttcatcaaaccccatatttttataatatcgaagttgcataaaatcctgagcattatggccagtggcacatagcctcatctatttattttgacaaaatcccacgcctatacatatttggtaaatatttacttaccgtttcaaaacatgtaatgcatatgaaacttttagttttttatttcttcattaagtttgtcggtttaactcttcactactttgaaaagtattatttcagatgtattgaaatcaattgaaattcgaatcaaggtgggaatttttaaaacattagaccataaaatctcttatgttttacaagtcataatacctacgattttctgtaactttgatcataaaacgtgaggctttataaaatttacttttaagatgattaatttatattaatttcttgagctgaaaaactagttctagttggtgtctatggctttgtgggaggtaccccttccatttcagattataagccgttttgactttggccaaaattaaactacttcaagctttgactaagtttgtagacaaatatactaatatttacaatactaaattagtttcattaaatctataattagatatattttcatatatatttatttttggatgaaaatgtacttgaagtaatttgactttaaccaaattaaaacgacttagggcctgtttagttccccaaaattttttcctaaaaacatcacatcgaatctttggacgtatatataaagcattaaatatagataaaaagaaaaactaattgtacagtttgcatgtaaatcgcgagacgaatcttttgagcctaattaggtcatgattagccataagtgctacagtaacccacatatactaataatggattaattaggctaaaaaaattcgtctcacgatttccaggtgagttatgaaattagttttttcattcgtgcccttataatctgaaacgaaacggggagtaggagattgttgcttacggaagtaggtggcggcggtggcggggtactcggtgatgaggccgtcggccatgacgtggaaggcgtaggtggcgatctcgatgatggggtcggcccagtagtcgaatccgaggttcatgaactcgttccggagcacgccgacgtagacggtgaggttggcggcgtgcatccggtcggcgacgtcggtgaaccgcgtgaggaagaagccgttcacctgcgcgatcgacccgcggccgacggtcaccgccgtcgcgaactgcttgatctcctccaccgacggcgccgacgcgtcgctgatcgtctcgtccaccatcagcacccgcctgaacgccgggaacttcttgaacgccgccagcaccgacgtgtcgtccgacaccaccatcagctccggcaggtgcccgccctccttgtcgtagctcgcgttcgccagcgcccccgacacggcatccaccagcccgaggcctcgcttcgcgaggaacgatgcgtgctgcgttcaatatcacaattcatcaatcacaaaaaaaaaaaaaaaattgctcagcctcagctcaaccatgatgatgagatggattcaggttgagaagagaagcatggtgattgtttgtgtacctccatctcgaccatgatgccagagacattggtggccttggccaagtctaggaattcaggcaatgtcacgaacttgccggcgttcttcgcggcggggttcctcttcaggcctgcctgggtgtacggaccaagaagatcggctgacgaaattgatcggacaaacaaaacaaaagagcaagatgtttagtgaatgaatatgtgatcatcttggatgaaataacgcatgaaaaagaagatttcaggtgctcattattacgttttaatgtttggatttcgctccatgtgagatcaaaggagaagatgcccgacttgttctgaatttcactgacagtggagattttggtcatgaaactggtggacgccgtcgtgctggtgctgaggtctgcagatggctggcagaaggccacgccgtctttcgacatccggaccgcgcaatcgatgatgtcggcgccgtctttcaccgcctgctgatatgcgaggtcagtgctgcccgggtagacgccgctcgcgccattgtgggttatgatcagtggcctgcctccatctgatcgaattagagaaatcagtgcaaatgtaggaatggtggtaacttatagcttgacaatatgtgacggtgaacagtaaaagtattttgcaacttaccaccaccaggaggaggaagaggattgcccttggtatttgccaaacacgctgcaaaagatcatcaaaatgatgctgttattgatgaataatacagtatgacaattttcattctttcatcagtaaaatttctgcatatgttcttcttaccaacagctcctgatgcagtgggagggaaatccgttatcacgccgtcgacagagaagtttgcattgccaatgtactgcaagtactctgcactgggatcaaagctgtagttgtaactcatggagacatcattggcaaatccagaggcaaaaacttcaagcccaagggcatgtgcatccttgaccaaactagtaggcagccgcagatactggtccttgcccaatggccaaatgtattccttggggacaagaatccctgatgcaaaggccttgacggatttcaggtctttcaggatctctccatacgttttcttggtggtatgctcagcgacgtcttctctaagaaaccggaaaattagcttggtgttgcttttcttgagcttagcacccacgtttttcaagaatccaatttctggtgaggagatgtaagcgacactaaaatcttttggtaatcctaatatgtaatcttcggcacttaatttgtgctcctggagaaataaagcatactgaaagcaaaaaaaaaaaagttaaaaaagaacttgtgttagagagacaatatagcgtactaagaaaagtgcctcagtaagtctgtgggtaatagtgaaataaaaattacctctacattaacccataaatgtgggggcttgagtccgacaagatcttcaagggtaaacattcccatggctccatcaaatgtgcttgggcgagaaaagatgtcctggatcactgagggatgatcaaatcacagaataacaagtcagagaaaagttgcagcaaaaaaaaaaattatagcttcagaatttgctacaagctgctatgtggcgaaccacctccaaggctccattccaaccttatctattcaaaatacataagaaaattatgaatcattcatatatttttatattttgaaattgacttcattcatggagcacaaataaaaaaaatgaatttttatttaaagactgtatgcaatgtttcactttgaagactgaaattactcagtttttttttctgcttacatgtgacattctgatacagctcgtctgcggtgaaatccaaagcaaaccacccatggatttcctctccattcaccttgtatgtcttggccctcttagggaaggcttcggcgataagcgtcgagttctctaatgtcaatccagttttgcagaagcccaaaccatcactggacaattgcagatcacagtacagaaccacatcatgcaagctactcgacattgcaaactggtacgagaactggcttgaatcaggaaacaagccggagaaccctccacgagcaatgacaagaggacgctgacctgtaggacaccaccacaaagattagcaaatcaaaatgcttgatcaggtgaaacaacaatctttccaattgaaaaaaaaaacagcaaagagaacaagaagatgtttacctccaagagtctgccatttctgtactggatctttcaaagccgcatgggctccatgaaaaagtaggaggatcaagaacatgtgaggatatctttctcccatttggacaggaggagcaccctgcatcacataatatttttgtgaactaatcaaacagcggagaagattaaacaatattggagtaaaaaaaactataccaaaacaaatgtacaaagaaaccgctgaaggatcatacatgcaaatcaaaggtgaaagataacctctcatcaaacttatttctttttcagagcagagaacttcaaatttaaattcatgcaaatcaaaggcgaaagataacttctcatcaaacttatcttttttttcagaacagataacttcaaatttaattttgcagagcaacatgctcgagaaaaaaaaagatacatacctcacatgaaactgcaataacacaattgagaaaagacgttctccagccccaccaagccgaggccacaagatgtctatatcagattgtggagaggaggcaaaagaggaggtgtcccggcaagggtgcgaacggagcttctaaaattaggtggcgctcctaaacgacggccacctttcatcagtcttaatttagagcgtcagctcgtgtgatttcccaagaaactggaaccatttttgcagagatgaaagaaactgcatacttttggtagtttaattttttttatgggatcatgaaataaaactgaccaatttatttgtactgtattagtgtaactgcttgtctgctgcagtaacagcagtggcggctttgaatggagttagaaccgccctcatgggagatctcccgccatcgccatggatgcatagaatgcgagatgggaaagctgaaaaaaatactaacgaaaattgagacggaatatatattttataaaaaaaaagagcctaaagttgtctccttggtttttagatgatgcatcccgagagccagccaatgatggtacatctaggctttgtttggcaaatgcgattgggaaataatatcccatcctccaaagtgcaatattgcatcctagccatccattattcacacatcatttaattctaatttaatcctagccattcatctattcccctttcccaatcccacctcccatatcccatttgccaaacacatccctaagacatgtagaagcgatgtagatgcctcatatatgatccaatggtacagttcttaattagtttcatctaacggtccttactattttaggtgatgtggctcattctcctttgagatcgatagcttgttgctttcacctagtggataccgtgcgcgttgcaacgggattttggaacttatttacttatgaacattgctcgaatggctggtatattgtacgtagttaacattgctcgaatggctggtatattgtacgtagtttgatctaatagctaacataatttgatggcgtggctaatcatgaaagcttgtttattttatagcaataaatatagttaataggttgtaacttatatatttgctccaaaatccaccagcagcatggcacataggaaaataatgtgagagctaaacagtaaaagtaaacgcaccaatgaacagagatgagagagagaacgatataatgatggaaaaatgtacatgatacaaactaataaaaagggcaagaattagataccgcatatgaatccctgtgtccaactcaagcacataatcacaaaaaaacaattgatccaaaaagaaggaactggtatacaaaagtttcattcaaaatagcatgtcctcattctaactttaaggtaaaaatgatcaactaattttaaggccaaagctacctttggggatgcttatgctctaggcttcacggacaattggtgataaaaaacagggaagatgtccatgatcgtattgggggagtgagtacagaatccaacaaaaaaaaatatccacacaatgcaacctgcaagcaacaacaatgtagttattttgttgaacacatggtacacataagaatataagattagcggcgtgcatgctggtgttaaacagaaggagatccactaactataatctgcaactgtggctgaagatagtcaggttggcacttagtttcatggggtgagataattagatgggaacccataaggaagaggaaggagtaatcttgctgtaatcaacatgtgtgtggacgaaagagaagcaatgcgaggaagagggagttcatcagaaaagaggaatgtggctttacatatactactaagatagtttgagagagcacgcttacaatagttacaaagagctagaattaatggggttaattaatgacacaagaacggttgctattctattcttattgatggtagcagtttctcaataaggctgttctttcagttctcgactcatctcttttccatgtgtacgtttttaaaactgctaaacggtacatattttataaaaaaaattataggaaaatttctttaaaaaattatattaatccattttcaagtttttatagctaatacttagttaataatgcgttaatctatcgcttcgttttacgtgcagagaggtttaggaacccctccaaaagaacacagtctaagtgatttgaatttgcatggttgttgcactgcgctgaaggtgaaatgaacatggcatataagaaattgaccatctcatattacattttgagtctactctaattaaacgtttgcacttggctatgcacaaacccagccagacgacaactttgatcctacaggtgtaaaaagttgatgattaggcttaggccctgtttgtttcaacttaagattattaaatcagattactctaaactggattataataagctgatataaaataagctatgtgttgtttgtttctctggattattagagacatctaagggtagtgggtctttagccactcaataatctggaaaaagctcctctagaggagattattggattatagtaatctggcttatagattataataatctagtataataatctacttatttgtttcagcttactcctaataatctagattataataatcttaagctgaatcaaacagggccttaatgtggaggctgctttataggaggtaatgcttatagtgggtttcaactatatttatactcgaggaagaaaggattagcggtttacaagctagcactgcaccttgccctaatcctatcttactataaagttatccccactaactccttaagcttaacatgcaaagatgccacatcatcatccactaattaacaagatgccacatcatcatccactaccaatcatcacatttaaatatcatgcaaacatgttatatctttatagtttttataatttaagagctttcaaatacaaacatgttaaattatcatccaacataatttacataatgtttcaatatatatctttattatgttttatgatatcctatatagttttatagttcatcctcatttagttagtgcttaaatgattaatctatggtccaaattatctttatcattttttcctctaattaagtcatatcacatcaattgtttttagcctttagatgattaatctactttccaaaccatctccttatttttcttcttccaaaaagtcataccaccttactctttacgtttgaatcaccattgtacatactatttaaatttaaattatcataaaccacattaacttacttaatctgatgttatctagctatcttacaacaggttatttttttttattgttatcatactaaatttcccgcagcaatgcgcgaggtttcacctatttttttaccacttctttaccactgcaccccattgtccaaatcagtgccacgagatacgatatcaggaaggcagtaacaatgattgaacacatttttcgttgatagttaagaaattcgtaggaagtgccagtaataatgatctagaaagcattaagcatcactgccataaaattcacaagtttgtaagataacatagcatgtcaaacatcacacaggaaacagtaccagtaaatttcatagagctccccagcattaatcgatatttagaacaacaattcagtatacggcaggagtcatgattttacatgcccgtgcttcgaactgtccaacattcgctctctttcctgcatcccagcctttgaagaccttcatctagaccccattgagagtgatcacaattttccgggaggaagcattgtcacgatgttcacagagccatataccctacacaaaataagtccatgaaataagtgctcaaaatttaagaagtgtgctctatgatctagacgggttttataattagttattttgctaggttacagctttgcaccggatattatcactgaaactatgcctgaatatgggatacaaagcaccgcattgccttaaaagataagtttaaactcgcgtgcaacataatcaacacaaatttcacatgcacgattgcatggtctcctaaaacttcatgacaactttttatctcctgtatatagattcgagaacttcatgatgaacttaaggtcgctatataaaacaacgaaacatttagtacttcaggtttaacctagtggctaaagtggtacttgttaggctctcaaaccatagagacaagtttatttggaaagttaacaaaaccagaatattttcggttagctccatgtataaatgattatgtatgaggatgtagtgccaaggaaggatttaatttggaagcttagaattcatttgaaaaacaaaatcttcctctggtatttaaagaagggagtgattctcacgaaggacaatctaacaaaaagaaattggaagggcagcactaagtgttgtttttgtaaccacaatgagacgatacaacatctcttctttgattttcatgtggctagatttgtttggagtaccctttttataacatttgggataaatccgtctaacaatgtttctaatatgtttgggatttggctaaagggtttacaatctaggctaaagcaccaaatctttatagggattgcggcgttgttgtgggcaatgtggatttgcagaaatgatgtggtcttcgacggctccaattttaactcttacttgcaggttattttcagggggacatactgggctcgacaatggttcttattgtgtaaagaagatgagcgtgatgtgatgaatgaaggatgcaaactgttagagacatctgtcatgcatttctttggtaaagatggatggaacatgagaaagcggttaaaggagttatgtggtcgttggtttgtttgggaagtcttttcactttgaaaggctttggagtctttgtgctcttttagttttataaattcccattatctaaaaatttagtactgcaggttgacaacaaaataaccagaaaataaaggatagtcaattgtgaaaatgatatcctatatgtttctattacctgccaagtgcccatattgagatgcccatcagttatagggatcctgaagcaatgcaaaagaagaatctaatttaatattttgttggctcacttgggagaaaattgacatggggaaaagaatgtagggattagggaacacatacgtcagggcacaaccaaacattgatgatttaatatgtgctggcatgtcatcaggtcctgcaatttgaacagcacagttatgactattgactaatatggcctgatctgaagaatagtacagtcttgactcttaacaaatcaaaaaaccgtatgctagagcaatttaataccatctgctactagttcagtacagcctaactggataccaaaagtaacctcttgtttctcaaaaaaaaaaaaaggaagtaaccacttaaataaccttctagagtgtgcttccaaggagcagatcggccctgaaaatagtgaacacacaatgaagtggctcttacatgatcccttgtttgatcatgatcaaagacaagacaaattgcaaccactgacctctggtacaattcggttaaggaaagtttcggtgtcagcttgtacatcggagtcatagttctcattgatggttagggaagcgcttgtgtgctgcactgtatagtgaaaaaaaaatcaatactacaatcgtacattcgtacattgaaaacatgtgtttacttggacatgcttatcagcttacgaacatgcatataattgacattgtcattactttaaagaaaatgaggatggtctattttcttatgatgccattaattgatgttgaacttatattacttccttgtataaattggttcacacggattcaaaacgattccagtcaaccacaaatttattctctcaagtcaatcccatgcacaagataaaaacaagtttttaacatatcatcatatcagaatagtttgctaaaaccctcgcaataattaaatcccacttaggccatattcggttaatccctaagagagagggagggattggaggggaataacttcacaccccctcaatccccttcaaaccgaacaaggcctgacggatctgaacaagcacgcatcacatcagcatcagcatgttcaggggaatttacctacaccgtatgcggttatccataaagtactttcagaaaattgcctagcacagcaatcgatcaacaacaaaatcgagctatctaagcaagagcgatgatgaatgaatgaaccgatcatgagttgagttgagtgtgtgcatctacatacagaacagatgcgccaagccgcacttgaacccggacaggtcgccctcaatctccctcagaatctgcaaaaggtctcagtcaagcaaagcgctggagcaaagagatgtacggacatggcgacggggagggagggagagaccttgggggtgatgaggtggcatccccggcgctgggcggggatgacgattgtcttctgcgcccacttggcggccatggaggagtgcgccgcgggcgggccggcgacggccaggccaggggatgcgaccggacggcgcgcaacggcggcggcgggttgtttcgcagtcgccggcggggagcagcgagcgagcggtaatggactggtggtggtggtggtgggccccgcgctctggaagcttcggatgggtgaatgccaacgcactagcattcgaggccgtcggatggatgatcaacgcttcacagaattcctggagaaaggtgcggaaaaagaaaaatactaaaatgagtaaatttcacgggattcctgtatgtttaaatccttagctctaattttatatttgagttataaatgttcacattttgtgattaggatcccgtttgtttctactgaaaaagtggatgaaaatttgagtactcatgacacgttttttaaactactaaacgatgtgtttcatacaaaaagttgctctaaaatattatattaatctattataaagtttataataattaaaacttaattaatcacttatttacagaagaaaagaacaccacctaaattgatatcatttactatatttcattttaaattcgttgttctatgataaatttaattttatgatacatcctattaaatacgtagttctataataatttaaccaaagtacacgtagtttttatggaatttacctttctcaaaagaaataatgtccgagcacgatgggccgcaatcttggcccagtcacagtaaaaaaaaatctcgtaaaattgagggggttttacgcattttttggaaaaaaatagcagtagccgcagcggaagcggacagcagcatcacaatcagcgagatgcaggcggcgctcctactcccagcgcggccgtcggcggcggcgccgcctacgctcttgcggcggggggcggcttctgcgtcctccgcgcgcgctcccactcccctccctgcggggcgcctcagcggcggcgtgctgagcgctgtgcggcgccttaccgtggcggcggcggggtcgtcgtcgtcgtcgtcgggccctctctacccgacgcctccccccaccgagcaggacatcgagcgggccaagttcgagcaggtgcttcgctaatgccgcacccccctttgatctgtctgtgcctggtagaggtgcctctgcttgaagtagggttaatcgtgtgttcgctgatattctcgagaaaactcatgttgctgtaccacttggggattggggatgtatctagtgttggattatgtagtggtcgcgtgttttccgatgtgcatttgggtatcatgaggtttagggttcaggcatcgagcgattagtaatctgatgtctctaagacagggaattgttacaattaagcgaaggtaatgatttttttagagatatcgtctgtaagcgactcgttctcttttctgtatattgtgatgacgttaatcgcgcataattgttggattcacttctgttagtttatcaaccttgctgcattaagttttccttatcgtgtgtcctgtcacatctattgctttctgattgaagtctttgtgaagcatctggttaaacaatataaatatataatgtgtcattcttcgctaggatatgatttataccttttggttactctattatcctaaagacacggcatcattggcatacttcgaattttgataccagcataccaccacttcttcctacttgtataacagaataccttcctgattatgaagctacgccaaggccatctttttgccttttagtttgatatgccatactcaatttggtttgtaaagatatttaatattcttgatggaccttgttggttaaccttcatgatatttttttttaagattgggaatttgctatttcttcatgcttgagaattttacataataatgtatacgccacaccttttaacttctgtatatgcttgttttagcctaattgacatttttttttgcccatttccgtggagtaaatggcaggttgtcaagagactggggaaaacagcgaggtatttcaagaatttgggtactcttgggttctggtcccagttggtgtccacagttgtttccgctggaattttgtcattttctacagttattactgggaaggtgacagcaccttttacattctatgcaactgctgctggtattgccgcgggttttatttcagtcttctggtcatttggttacatccgcctttctgaaagacttagaaaaacagcaagtgaacctgctaaggtactctctttctcaaccccattccctgttttataatgtctcaacactgcccttaactcattttcgtacttgtctgacttctattggacggctgaactggtgctttcacataagtgtgttatatgtctgcttttggagttatatattttaggtggttattttgtacggcaagtttgatattcttcttatttgcctttttggtaataaaataaaactgtgaattgctttccaggctcctccacgtgctgatgtaattagaagtctgaaaaatggcattgtgctcaatatgctcgggatgggtgctgcagttctcggcatgcaagcaactgttggggctttggtagcgaaggctcttactacctctgcagtaccttactatcaagcaacttcccctggtcaaagtcctgttttggctctagatgttttcctagttcaggtatttgatttgcacatatcctttctccccttgaaccattttctctccaaattttcagttgaaaataagcaccatggttcactctcatttttctgcattcaacattctggtgctggttttcaagtacttaactcatttctactaggaagtaatacgtttgtacacttgcagtttttttaagggcccctttgaaatggaggattggcaaagattcatttgcctaacgaattttcctatagagccctttgatccataggaaaacttccataagataggaaaacttccatagaatagctttcctatggtcaattccataggaaaataagcaagaggttagacctcttgtaaaactttcctttggttgagttttttctgtggtgcaatcaaagggcttcttgtgctctcaattcctgtaggattgaaaaaacatactaattcaattcctgcgtttgccctattcctacaattttcctatcttgcctttcaagggggaacctaaacgacatatatttgtttatcttggtaaagaacgctcactgagaggttcatgtttacatgatattctatactatcatctactttaaatgatttgtctgattctatatatttttattaacgttaaggatcatgtatgtgtaatagcaacgagataaatccagcgtactatgcctcactctgaataacaacaaaatataactaccctaaatatttccaaactttccctgcttttaatcatataatccttcttccatgttgagtagaaacttatattataaccatgttatcatttgctatgatggaaaatgaactactgaattgttgtttttggtcatcattgcacactccagtttatgatctgacccgttgtagtgccattaatcatgttgaacaatcatgatacgcaggcttcagcgaacatcatcctgtcgcatttccttggcctggcgagctccctggagttgctgcgctccgtggccatccctccagcagaagctgctgcggcgtgagcatatcagcgcatatgccaaaggcaagggctcccgttgatcatcttgctcttcatttgctgcttcgggctttggtattcgctaggagtagcaccgctcgtccgcctgtatgtttcttgtccagacaaaatttaaaaaaaatctagctttcactgcgtaaatttcatcttgcttgatgctgagtagcagcaggttcacatgaacagcagtacaccggggagctggtggtggtacacgtacggtaagcacacaggctttacgagttgaatttgtgagcgtacaatcgctaaggttgggccgagttgttgggtggtggcactgctcaccaggctgcaggctacggcacgggtggaccatggaatgggctgggccctgctcccgcccgtgcgactgtgtcctccccagcgcagcacgagcggcggttgcgctcacgcactagagtagaaatcaatgaaacccatgatgcccccccccccccccccccaaagcgaaagaaaattagtaccactacagtactaggagtatgtgttgaggaatcaggaaacttgacatgttgctaaatgacccagtttatctaggagtacttaattttgaagagtccgtcgtgtcaaaaataattggaagagtccgtacacatactagtggttgtgggtttgctctttgtacacataaatgtgttgcactgttgcttgtttggtgcctccaacgattttgcagtggttatatagtagtagcactactccgtctattgttagcatgcacttccaattatgcaccttgacaatccaaacagttgtttaaattaaaattcaaaatttcattgtactacacgtactactcttaaatataaggtgttagagaaaggtacataaggagattatcgccctcattggatggcaaatgctttggctgataagccatttaagcaaaataagctaaccaatttgtattgaagtttggctgaattggaggtagctttggctgatcagccaaagtatttggccaaccgatgaggccgtataagaggatgttataattagttgagaaaataaaataaataaagaattaatatagtaaaagattatgattgattgagaaagatgagtgctagtccctttaaatttgactaagtttatagaaaaatatactaatattttcaatacaaaacaaacatattatcaaaatatattcgatactaaattcaataaaactaatttgatgttgtagatgctgctaatttttctataaacctagttaaacctaaaaactttaacccagaaaaatgttaaacaaatatattactaactgcactctactgtgtccgtttgtccgctcgcgggggcgccggaatctctccgctctccaccacaggcagacacacacacggcacccctccctccgcccgaccacgcccaacacgtccgctcccgcagactccacaaccgcagttcagttcagttcagttcacgcacgcacgcgctgacgcgcccgtacaccaccagcccggccggggagagagagaaatcccgagagaaaacgagaatatcccgcggcgtcggcagatcggcagcgggtggttgagctggtactagtacgactagtcgtcagtggagtgccggcacgtacggattggaggcagacagaccgggtcgactcacctcataatcatttctttcaaaaaatctgcagagatcgtggctgtccgtcttgtagtgagaagcaaaaaaacggtgagattcgattcgcggctttggttggttggttggttggttggttagctactgcaaaaatcacaaaacaaaccggtctccggaagttgcaaggaagctgcgaaacgggtggctgctctggttgtatagtactcccctggatctcacgcacaaatttatgggcgtgtttagttcacactaaaattgaaaatttatttgaaattgaaacgatttgacggaaaagttgaaagtttatgtgtgtatgaaagttttgatgtgatggaaaagttggaagtttgaagaaatattttggaactaaacacgtgcgtgtttagattccaacttttttcttcaaacttccaatttttcagttacatcgaactttcctacacacataaacttttaatttttccgtcacatcgtttcaatttcttcaaactttcaattttagcgtggaactaaacacagccatacacaaccgagatcggtaagctacagtataactcaatcaaacactaatttcgttttttttcttctcttgcgtggagttggattggatggggggtacagcgcagtacagtaccggcccggtgtcggtgcggtgggaggccgttaaagccatcgccagcctgtccctgcctcccagatccacgtcccctttcgccctgccatgattccccctcctcctctgacttcctttctccacactcacacactctcgctttccttgcgccttcgtcgttttcctctccccgcatacgcgtcgacgcacagcagcagtagcagtatgagtgcctgggtgtggggcccacaggtggttgtgtacgatagcagtacactacaccctctcttccaaaatacgtaggtttatttgtgggctcgatcattaatatcgataattactatttatgttttatcatctggtactaatcatataaaagttttacataatatcgataattaaatattgaatacagacgattataaataaatttattttgggaaggagcaatagagaacgtatagatcgacggggagacacctgcgctgcgggtagtgctgagctgtgcccataaactgccgcgccatgcgtccctcccctccccacgaaatcgcgccggtttttatctaccagccacgattttgcgctccagcctggcgcccctgtcgttttccgcacgggctaacgatacacccttctcctatcgctgccaggtggggtcggtgtcgtgctggggcccacgcgtcagtggcgttgggtcttcccgtcggcgcggggggtgtgtgggcgagcaaactgccggtcgtacagtccggcttgtacacacacggtacgggcggggcccggcggcgggttggacggttgcgattgaattcggcggggtgatggggggatgggctccggcgcgggctacgccttcggctttcgcgattgcaaccaaacaaaccccaacccccgtcgccttcccaaatgcccacttccaacaccaagggggatggatggatggatggatgcactcatgcacgcttgcatgcatggctggatagatggatgataggtcgatctatcatccacccgagttttctccttcccaacctagcggatggataagctcgtcgtcgttgtcgccaccgccgctctcttttcacattctctttgcaaaatatctatactgtttttattttaaaatacaataatttagtatgagatgtaatacatttagtgctgtgaatctaaagacagtgatgaaaaagaaaattagcataacgaaaatataaatatgaagtactttctccgtttcagattataagactttctaacattgataacattcactttctgtgaatgttatcaatgttagaaagtcttataatatgaaacggaggaagtatgtacgaaatccggttttaaaatgtaaactagtatgatggcccgcgcagattgcgcggctagcatcattatattttctctcatataatagcatatatgttttctcattatattattcaaatatattaaaatgataacataattttaatttttgcaataactttacaaaactactaatgtgtaatattcatattatattttatatacctgttagttattaattatttttaatatcaaattttagttatttgtaaattatatattcctatatagactttagactcgtcttttaatatttcatttttttaatttcgcattttctgtaaattgtatttctatatagactctatgcttttcttccagtattatttaattttatttctgaatttttattatttctaattgtatttatatgtggactctaaactcatctttcaatattctttaatttttagtttcgaatttcagttacttctaaattgtattcctatattgactttaaactcttcttcccatgtttttcttaatttcgaattttagttatttgtaaattgtatttttatacggactctaaactctacttttaattttattatgttcattccaaattttagttagttttaaattcctatacgtactctatactctatttctaatattccttatttttaattccgaatttcagttattttctaattgtatttctatatggactctatactctacttctaatattccttatttttaattccgaatttcagttatttcctaattatatttctatatggacttagtctcctcttctaatattccttattttttttaattccgaatttgagctatttctaaattgtatttctatatggactctagttttctcttctaatgttacttattttttaattccgaattttaactatttctaaattgtatttctatatggactctgttttttctttttctccgattaatgtaagaatttctaggccatgagaacgaacgtgggagctactttttctattactttaataatataatagattttgttggcagctcatgagtagtaaaattattttggcactataaactgaaaaataaaatggatggagacaccgttctcgtcttgggttaaccgctccaacactttcataattgagttttcaacggattttattttttttcctctctgtgtgtgtttgactgtacggaatgagaaggattattcaaatttcaaacggcacagggacccgccggcccccgtgtaacaaaccaaaccaaaacggccttcgtccacactactccagctcgaggaggaccgcgtggagctccctgacacgtgggacccaccaaacctcttgtccccacccgccatccaggtaccgaaaatgacgcgcctcgccagctgtatgccaccgtctccttccccccaccgcctatataatcccctctccctcttcctctcgccatcgagtccgacacgtccacatcgccattagagcagctcgaggaaggaggaggaggaggttgattcgatggggatggaggcggagtgcgataggataaaggggccatggagccctgaggaggacgaggcgctgcggcggctggtggagcggcacggggcgaggaactggacggcgatcgggagggggatcccggggaggtcggggaagtcgtgcaggctgcggtggtgcaaccagctgtcgccgcaggtggagcgccgcccgttcacggcggaggaggacgccgcgatactccgggcgcacgcccgcctcggcaaccgctgggccgccatcgcgcgcctcctccccggccgcaccgacaacgccgtcaagaaccactggaactcctccctcaagcgcaagctcgccaccgccacggacggcggcgagatcgaccggccgtgtaagcgcgtgagccccgggccggggagcccgacgggatcggagcgcagcgagctcagccacggcggctgcggaagcggaagcggcggcgggcaggtgttccgccccgtgccgcgccccggcggcttcgacgccatcagcgcggcggacgtcgtgcggccgccgcggcggcgggacgacaacgacgacgacggcgacgacgacccgctcacctcgctgtccctctccctctccctcccggggttccaccacgacagcgcgcggagccacttccaggagctcccctccccctcccgctccccttcgccgccgccgtcgccgccggcagcatctccatccgcatacccgttcaacgccgatctcgtctccgcgatgcaggagatgatccgcacggaagtccgcaactacatggccggcgtcgggctccgcgccggctgcggcccgggcgccgtggccgagtccttcatgccgcagctcgtcgacggcgtcatgcgcgccgccgccgagagggtcggcgtcgtgacccgccaataaaaccccccaaaaataaaaaaaaaatcaaccatcccggttcaaattcaccacaaatgcacggtgaaaaaccacctgttaattatgagatctgtgtagtattattagcactagaattttcctggttcatctttgtattttactttgagtaaaattcttctgctgctctgaaacagagcagcggtgaaggggaggtaaaaaaaaaatcagaagcgaaatgctagtgcattgctactaccagcacagcagcagcatcacggacaggttggccgttttctgtacaggaacgaggtgatggtgagatgtagcgacaggtttctccttccctttgaaccgtccgtgcaacgaagagtcgaagactacttgggcatcgatcagatgtgcgagttgaaagtgatagtagtagcagcatgctgtactagcagtacgcatattggacatttcagagcatctaacttttaaatgtggcaattaaggatttaccaaccacaatctataacatatgggtaatctttaattgccactttaaatagttaaatatttttattttggagctatatggccgtactcgagctgtaaataaccgatgatcttttctttttggaaaaaaaaaagcctttgtttcgaatgtataggaattttctgagaatctgaaagtacttatattcctcagaaccgtaagaacttgtttcttattggccgctttgcgtcgtttaaccgttgggcatttgtctctatcaactctatgtgcgtatagaatggatggattccgatctcattgtctctttccatcagtctatgtgtcacgtgtgtagagaatgatgaattgatttatactccgagtagaactcttttgctaagctaattcattcctattcccaaagaaaatgggcgtatgagtctcatagtaatacgagacaattcaatgcccaaaggaaattgatttctactgtagtgagctgtactgtccagcaaaacggttgtgtactgttgaccattcgaatcgatcgttggtgcagcgcacggtacaacgaagtaattcggccgcagcggccagaggagcagggagccaatatgagctggctcgtagtaaatcgagtgcaggacgagtagtagtaggagtgagctgtgacagttcacggttggcggtatttataccagcaagtgatgaagctagctgtacacagctgacctgaccagctgctccccccaaacatccctttcctgtgcagaacagtagcttaaaggattcctgacactgttgctgcagcagcagcagcagcactactagtagtagtactactagcaagttaattgcaaatctgcaatttgttcagcagcttgaaagcagatgcttgtttgttgaggccgtttttgccggtgatggttggtagtctggtgtctctgcaggaggcaacataggcctcggtaattctcacccatcgacagttcaggcccggcccaaattggccagatgagcccactgatcttaagcccaatgcaagtgaaacgcaagcatgattttgatcggaaatgcaaaatggtccatatattgcgaggccgaatttataccggaaaggcacacggacgttacatggacaagtcgtcagagtctcacacaaacaagttcaagaacggatcatacggatgctgccatgagggtgcacggcggcgatcaggcgggcggcgcgtcggcgtcgtcgatgttgctgccggcgacgtcgacgacgaagcggtagcggacgtcgttgcgctcgaggcgctcgagggcctggttgacgtagtccatcttgacgacctcgatctgggaggtgagccccttgtcgacgcagaagttgagcacctcctccgtctcggccatgctcccgatgaagctgccggtgatggccttccggccgagcatcaccatgggcgagatgaagctcagcggctggttgatcacccccatcaggatcagcttcccgtccagcttcagcagcgccaggtacggctccagcgggtggtgcaccggcacggtgtcgatgatgtagtccagcgagtcgccggcggccgccatcgccgccgcgtcggagctgacgaggtaggcgtcggcgcccaggtcgtccatggcctcgccgcgcttcctcgccgacgagctgatcaccgtcacgtggtgccccatcgacttggccaccttcacgcccatgtgccccacgccgccgagccccaggacgccgccgcggagacctggcgacatcagcccgaagtgcttcagtgggctgtacaccgtcagcccggcgcacagcagcggcgccgcctgctccggcgctagccccgccgggatcttcaccacaaacctgcacacaaattcattactttttttactagtttcttaccatctcactaaccaaatattttaatctttttaagacgtgacaactttcagattaggcaggtggatcaaaaatcacgggatgttttggtttgatgccagaatttgccctatcaaatagttggcactttaaatagtaccatgtatatgtttgtaatgatgtcaaaatttaccaaaggtaatacaactcttagagcaggtacaatagcaggctaatagcctgcttacctaatattttaacatatatgatagagagagggaaagcagagagagcaaagcggacgacaatccagtcaccggctcaagcacgagcgcctaggcgctctggccccctgcagctcgggacaaccaatcgaaaattagaacttgaacatgcagaagttaccaacacctgacaggatgccttggttaaagcatgggtgtagccaattactgtatctaccattgtttagttatctcttaaataatgtggtgaattttggagccggcagttaactttactattgaacttgctcttataaaccaactatactaaaatattggtagtgccaaatcttgaccatgatttgacgctaccaatgatttggtagcgcaccaaacaaaatgagcccaacatttcactgtctctgctagtttaccaactgactacaacgacgctatgcaacaatccaacttttgctctgttcaagaagcaattcttccaacaacaaatggactaatggaccggggtaggtgaggacttatcagttaatcaacactttatacctaactttggtgacttctcactttacactcaacacagtaccgacttctcgacatctctttcagtctcagatgacattttctccacaaaattttctaacagactggactttactttggatgttcggaaaagtccagtctagttttctctacctagaacactgacaatatgataatatgataatgatatcgtgatcagttggttggtgattacttgttggagtaaagctgtgtttagcactcacttctggtcgacgaccatggcggaggcgaagccgccctgggttggccggccgtcggtgtagacgtcgttgtaggaccaaatcctcttgttgcagtactgctccacattggccttgcacggatggcactcgcggcagcagccgacgatgacgccgacgccgacgacgtcgccggcgctgtacttggtcacctccggcccgacctccaccacctcgccgaccacctcatggctgcagacgagaagaggagagaattttcttggtcaccgacaaaatccaacacatgactgaatattggtacgacaatggaagtgtactggaaaaaggaattcttggtcaccaactaattaatccaaccaattattgttgcatacttagtacgacatgcagatggtgtagtagtactaaattactactaattaggcatcatttttcagcctggtgttggggatctatcgtgtgcttatttaaagcccatcagatcagggaaggttctcgctgaggttttctttacacgtgtctctgaaactgatggtgcatctaatctgtactatacctgtcatgaaaggtgttgatcaaaaaagaaaaatgctaaaagcgatgcactaacttatctttctgttccaaaggagtgtgatatagtggtgcatgtgcatctatgccttttgtaaatctgaaaaaagcactgaccagatttgctagttactagtgcctactcttttctgatatgtttgttatcccaatcagttaataagtttatcttcagtctactatagaatacaccatcaaatcaattgctagtagaagatctccattgacatgagccatgatccatctagataactgtgaataatcttacccagggaccatggggtacttggaagcaccaaggtggttcttggcctggtggatgtcagtatggcagataccacaatacaaaaccttcaccaccacatcttcaggcccagtcttcctggtaccaccacatacaggaaaaaaaaagaacattagttgatctgttgcataagatgcttcttcagttattccattctacaagaagacaactcaaggaaattattgatatatatataatcctccttttctttaaggaggcatggcacgagaattgcatagcaaatatatatattagaaaattataaagaatgcttctgaaaatatatatatgtggagccaggcaactagccaaaaagaactccatgcattctgtctgtttgccacaactgctccggattcagggattctgttcctttcacccaacaaaaccaagacgtgacgatgattgcaatagccaattggcggtaggtgaagcagttttggtagtacactagtactacaccactatactcttcatgttggacttatactaggagaggagcaggaatacaaaatagagtcaaactcacgtgggaagtgtggaatggatcgaatggaggagcccaaaaaagaaaaaagaaatccaattgctctcttcacctcttcacactttggccaagaggcagaaacaatctgagttgtactcgaggcagatgacatgaacacaaacaaattaaaacacgggggcatctaaacaactaaagcactggaacgccatcagttttcagaaattcagaaacgaaccatctgaacaactaaactgtagtagaacgcatgtaccagagtttcagaattgagacaaaagagaaactaaaacctaatccctccgtttctaccgaccttaagcaaaacttgcaagaacaagatcgagaaggagagggtgatcgatcatatcatatcatacctgagggtgtagttgtagggggtgaggtggccggaggcgtccctggcggcccacccggtgacggtcttctcggcggcgaggctgcccatcgtctctggacacgaacacgcgacgcacgaggcggcggcggcggcggcggccaatggatggatcggattcgggaggaggaagagaacaagaacaagaagtgcagtggctgattcgctctctctcgctgaattctggagagggggtggtgcgtcccgcagcgagtatatataattaaaggaaaacatcgcgttggacgggtcgtgactgagagggggaagaggggttggtgaaggctggctgcctcggagatcgtgccaggatcttctgtggccacacggcctcaatttgattcgtttttgtttttttttttgttttcgtgcaagacagtttttaaattgaaggggaaagtgccaaagtgggtatcgaaatgggaacaaaaatgttagtagtaggacaagtagtggaaatgtttggtcgcgtaggttttcctaccaaggttgggaagtggttaattagctggtgcgtacgagtatggatggagtagctatatcagctccttcataatgttttattccctcattattaatgttaaaatgattaattacctattcaactactttatccgtatcaaaatatagtaagctatcatactgggttagataccatttagtaccataaattcgtaattcgtagtactgaaacatgtcctggttcgtagtctattaagtggtgtctaattgactttatctagattcgtagtactgaataagatttaatcgagtactcggttattacgttcactatccttttcatatttggattctgtcgacatttgatgtcgcgattccggtatttgcatagtatggggatctttgatactaggatatacgcgagacttaggtaaaagagacggaaacagatttttatacaggttcgggcccctgaattgtcaggtaatagccctacaacctgttggccgaagccggtcgttgctcttattcaccataatcacaccagtacaaatattggggtagcctatctaactgttgtcgacatggcggtctgaagttcttactcatagtcgacaacagggtagccttcctcctcgaatccgcatccaacgagatcagagacagcgctatatctctcctaacagtagccataggtacctaggggactagctatgcctatctctgaagtcgatatctggcatcttgtcttggcgtatattggcttgtatgttgatcttctgtcttgatctattgttccgtgtcccctctcctcctaggaggccttgtatttatacccataggtgtccccttgtccaagtagaactagggaaaccaatatggatacaatccgagtagttcttgtcgtttccatgtagaactttggttgttttttcttatccggaactcccttcatatccgaagtcagttcccgtataagacatggtatgtggtgggtcatgccgagatttagtcaactactattaggtatgtggtatccataaccctaacagattccctttatacaaaagcatggatatactctatatagaggtgcaatttaatttagattttttgagcagattatcaatttgactacaaaataaactatattttgtaaaagtaactttacaaatagcttaaacaagttgtatacaaagcatatttttcagaacacggagcaaataattcgatttaataatctgattaataagcagaaaagaacataaccttgttaccatagggtaaactcctataaaataaaaacaatatcatatttattaatagggtgtaaccaaataagtcgccctacaccatttgtatgcttgactattactcctgatattatctccgtgctattagtctcaaccttatatagtgagctacaggacaaaaataaaatacagattgagtcacaaatctctctcttgctcacacctacaaatcgaaaattcaaaatgctcgaaagtcagaacaaacataaccatgaaaaagcgactttagttagtagcttgactacttcccctctaaactgtcacacctatcgtggattagtcgtggatttatggatgattttgcagtgattaattttacctcacaaacagtagccatcatgtccttgtagaagatctcgtttggagaaaaggaggaggcacgcaaggcacgcgtgcttcgcatgcgaagcgaggtgacgtggcactgtgccagtggctgagtggactaaccgggaggggagaaaagttgcagagaacgactccggggttggtggccgggcccatcgcggtaggtgggtggggcccacttgccatgtctggtgacgtcacggatacgtcatctgaacggctgtctgtgaagagagagactgggacatgccaaccttcaacagcacgagtggttcatggtcaactgaggatgatagaaaaagagaggataaaattaagctttgatttttattattatagtactagtacttatcatttgcgtatgttcccaaaaaataaatgttaaaatttcctcttgaatgaatgctaaggggttgttcagatgataatattgctaaaattttggcatgatttcttatgtattaaccaaatttgacaacaatttaaacgtatgtttttttttgacaactttgctaaaaaatagtatggttgaaaatggcatcaaagtaaatatgccctaaattttcatatgaatgacgagtgatttttttaaaaatattttgaaacgaggcgagtgaattggtttataggcacaaattgtggcacttggtgacgaaacaatttactaaaccaagcatttttgttttaatttgttgccgcgtgtatagcagttttcgtagtgatacaatcatacaaaagttgccttttgtgagggactatcagttgtgacagcaaatacgatatgatttcaacttcatatagtgttccacatttgatattaaaacatcaatttcggtttctggttttcagtggtgacacgttgtttgtatgcttgtggttgctacttgtgtacttacaagaaaaaaatttagacttacaaatttgcaagttgcaaccacaccaaaatctcaaaaaataaagaatcataagcacccaaaactgatagctacacatatgtgccggtatggattaattgtcgatgcttgggatcgttggatgcaacatacaactctgttctggtgaaaggtcaatttcagatcgtaacatatatcatatcgccaactaattcggccattctttgcacaccacagctagtttaatcgatcaatttgagtcgcacagctagctgcatacgagccatttcgctcttatccaagtagatatggaagaagatgcttatcttaggtagttcatggttcatggagatttgttgctagctaagtcaaggatgtgatcactatcataatcatatcaagtaggagtaacgataaatatattaagaaatccgctctaattatacctccgagcccatatatgccaccaactcgacattgctaataatgagaaggggtaggagatgccgatggacggtggcctaggcgcaaatagagagagggcgagccaaaggataacaataaaagcctattgggagtttagtggggcttctccccctccctcggtttaggagagtttttttcatagcaatcattttttacttttgtttttcctttttctttgttccctatccccggcaatggccttcggctgttgcgttgtaaaaatcaattttttcttcttctaatatagtagcgtgcaattcttttacgcgttcgtgaaaaaggacaacggcagcgtgagcctcctcccaactataccctcatcacataacctatcattattggcatcgttgtgccacctcctcgatcgagctctagcatcagttcgagttgtgatgaacaaaaactttcatgactccatcccccaatccctgcgtcctcatctacaaaggatgtactccatacattcaaaaaaaaccaatcctagatttaaatctggatatacatgtgtatatgtgtccaggtttaattttagaattaagtattttttttagcggacggagtagttgacgagcccacgaaggacactagtggatcggcgagcttgttggagagcttgataatggccttgagcactcatggtcgtggaggtccatcccttctcttaagcagtgccacatggcaggtcgcatgctggggagggaggagatggtaaatgaagcatgacaagtaagaagcatgtatgttttttgaaaatttattttctcaacttgttaactggattagcatgaggccaaaccaccgtcaaatgtgcgtatataggactgataccgccttaagataggtttgagtggggagggactagggtaaattcatccggtttgaagagtttccgtatataaaatgtttttgtctttcatttgtggggcatcaattggactagggcaaaagttaacgaagttatggaacctcttttaccatataaaaaagtattcacttggtaagcacggaagaaaaaaagtttgtcttaccttggtacggttattgaatgctaggtatatatgactccatccattaacattacgatatccatatgtattatagtctcttttattttcttttttttttcagaatgacaagtgcgtcggatcgcaggccaatagctcaatagcaaatttagatcataataacaaggattaagttcacttcagatccctcaatttgtcgcctagtccgatattcatccctgaattgcaataccatatatgatgtgtctctcaactcctaaaactagtgaaaataaaatcccaacaactcctaaaactagtgaaaataaaatcccaagacggtttggacaacggtctcgactgacgtggcacatacatggtgttgatgtggcacttaaaacagaaaaaaaagagattcacatgttaatgagtgtttggttaaaaataacaaaaattgcaatggactcatgccatcactccctccttttcccctattctctccctttcctcctcatcgtcggtgacaacattagtggcagggccggtgaggcgaaggtgcgcgtgagcacgggcgggggcggccgagggcatggagggagttgctcgatgcgacaatgttcttgcgcctggagagctacggcgaggccaaggcatgggtgtggcagaatctctcctacttttgcgccaactacgcgggaggagggtgtcatcacgacaattgggtgtccacggcgcgtgaggccacagagtgcaagcggtggcgactggcggtagcatggagaaggttgtcggcgttgacgcgggaggagggtgtcggtagcgtagtcatgcccttgacgaactcgcggaggtcttcgatgatgccatagtgctcgagctttgcggcgtctggcttcggcgtgacggcggaggggatatgtgggatcgcagggatggaggggacggggaggtcggtagtgaggtgcttgatttggttgactaggaggtcagcctgcttgttggcctccgctgtgatctcctgtgagttggttgtggtctctgagaagatctccttgaacttcttcgccgtctccaacatcattgccaacgagtgcgtggctgcctccgccgtctcccttctcccttactactgctacggctacttggtaccacatggcatgaccgtgccattgacgcccagtcgccacaccagcgccttgctcccatctgtgctaccaagaaaaaaagattgagagaaaaagagagaggggaaggagatgacctgtcactcacaggtgaggtcccccaatatttatatttttatttagaccgagttgtcctgtcatgtgggcctcatgcttgactcaagtcaccgtgtcaactaaaaccgaccactatgctgccgagagaccaaagttaacacggtattaagttgggagacggattatacctgctatttcggttcaggtatgaatttcagactccgcgacaaattgagagacctaaagtgaacttattcctaataacaacccataaacgcctcgttcgagagcgcatgatttaaggtccattcgctgccaaaccaggctaaaccctaaaccctaaaccatacaaatgcccataagcaaggcccatttagaaccatacaaagagaagcccagttacagcatttctaggtccatggaaatagctttgcacctgtgctgattcggttcatgtagcccacaatcttcgatatatgggctgcatgtattgtcaacgttttgcatatgcgcacgatatttttttccctctctctaactctcttccattccccagtcaagacaacaatcacgcctgtcttttgtttcgcaagtaaacgtacggtcctaattaacgattacgatgtgtggtgttcgcttatgcgtcttaattgcgaaaaacctttattttgacgaccttcatggtaatgccattttgttctcttttttttttaaaaaaagaaagtctagcagtgtcactccatatatgcattgaatcatagtagtcatattctgttgcatcatttatatacaaaattccaaatttagaccatatatataactacaaacatgtccaaactaaaatgagagtacagcaagtactaccactatactaaatgttgcgttctgacgtgttgttttttttggcggtttgtctaccgtgaaaaccttttatatcaaagtttctttgaaaattcaaactaaccccctcttaactttataataattaatattcgattaatcatatcataatcatttttcttattttgcatgcaaaacataagctcatcataaactccatatcgaatgcagtctaacacctgtagcagcgtgtagaatttggacattgcaatccaatgaaaacagagcaaaatccgaacgaaattatgaactctgatcgggcccatacatggccgggcgaaacgaaggcagcatggccctccacgagcaaccaagatctggtcactgatgcaacagtagtagtagtagagtaggagagacaatagtacatgtgtttggttacgagtactccgtagtagtccgtactaacacacacatgggtccaattctactgttactgaactggaatactccagctagtggttcaatactgatcacctagcgacagagtaaggtatgggtttatttgtgaggcacatgtaatcagtggcgcccataaggccagcatcatctatatggatccggatccgctacagtcgctactgtgactacaacttattctctccgataaaaaaaaacaaatgtaggactgaatgtgatatatcctaatatgacaaatctagataggtgactgtccacattcgttgttttatgatacatcacattcagaatttgtatttttttatggagggagtaagcgatagcagtgcacatcattggatgtaaatcggaaggtctacattacacattgtactgttcataacactgaagcaaaactactgtttgcaccattactgtaacgtggaatcttgaccgttgataggaaaaacgaacggccaaaattatatgcggtggttaacttgcagttccaactataactgcacttgatatggattcaatcgagatgttccaattataactgcacctgatatgaatccgatctatatgtagctcgtcagtgccaatgttaatatcaactcaactatgatgagtgaatattcatgtgggtagaaagatacatgtatgagttaatgagtagtcgagtatgccatttttaaataaatgacaccggaacccttcaccatcaaacattgtattctcatccttttttcaagagagttataaatagatgaaaagatgttgtaattagcagtcaaaacacgtgtagtaatccacactgtcaaatattttaaaatagagggagtaccatatgcatcaaacaattcaataagccatataatatgaacatgttcatttgacaacccttgaactcttcactttgtttgaaacacatccgaattcaaaagccaggtatttgacaccctccaactttcaaaattattcaatcgaccctctttggtccaaataagttgcatattttttgttgatatggtggttcaataagccaaaacataagataaaaaaggttggccctgcatgttaggtaccacctcatctctcttctccctctctttctttcttgtctcctccccgagcaaatgagattggcaccaatgagcttgagctccaccccccttctcggcgcgttgagtactggcaagcttaacctccaactctgtctcctcaagagccttctcgatcctccataagatcatgatagtgagctcgagcttaagctctccattcctaggcgcctacatctccattagattgcaccgacgtcatttcaagctcctactccctaccgcctctctccaagcttcctttcacattgcctatgtgcacctattctccacacgctgcctcctcctcaagctatgtcgcaccgcaatccacatcgacgccatctcaatgagctccaccgactcgttgtcacacaagctcggtgcaatgattgctcaagcttgagctctaccaccttcgttcttcataagctcgctgtagcagagtttgatctcaagggaggcagagcttgatggactggagtgctcgaggggcttggaagagtcaacatggaggcagttcatcgcctccttccatcgttgcctactcgcactgccttgagcactagatctagaagaagataatctattgcagaggtggatgagaaggagaggtgatcaacaatagtggaggagctatagctcaagctcacctccactgagatcatggggccacaccatgtagattagagggagtaaggtgagagaggaataggaagagaaaatagctaaagtgcactacaagataattgacctaacgtcaccaaattattacaacgaaaaataattcatggcaatatattatactattgcaatgataatttttcagtggcaaataactatattttattgcaacgatttacattcattgttttattcaatatttttgttgcaatagaaaagagctatcgccacaaataacattactgttgcaaaggtatgttctatcgccacaattttaatttttgtgacaatttgcataatacattgttgtgaagttacgtttcactattttttgttgccacgaacaacaaatttgttgtaatgacatgagattcttctctatctctcccccgcttatgtgacatctttgtacaagtgacccaatataccaaaactaggttaaaaccaacgtggtgctagggttgggtggagggggggggggttaatttgtcaattcaacggtagaaagttgcatgatattagatatccggtttcagagttcggagtgcattttaaacaaaccttgatgggtgaaatcttctactcagaactctacaacatcactgattcaccaatgcccccctttaataaaatatggagagaaccaagggaatttttataaagcggatgtgccaaattttcatgtgcagaataatgatttgcatggaaatatccagggatccgatctccacccctagcccagcgttcgactatgttcattgtattttacatgttcataattatagtggggactcactttttaagtacattttgcaatcaatgtgattaattgcagggtcggacatagaataaaaattgactgggggcatgcataactcatattacaagttaattagaaagctaagtgaaactcacaggcatgcataactcatataacaagttagctagaaagctaagtgaaacttcacctcataacaacttataaaaactttgagatattacatgataaaaatcgtccactaactcccctatcagatcatgacaaggatgattagatagagcattgaacctagagagtcatcctcatcacttattgactacacgagagggagatatcattatgtaccgagggagatagagagcagcaggcccgacgtgccacaacttcttcatgggatggagtgcgctgtgcgcaacaacgacgatgatgagcgatcaaggaagtggcgaaggtgaagtgcggcctgtggaagcactacaggtggggcgagatgatgggctcccttgtcttcctgttttctaatccctagtttgtggatttgctagttgggggatcgatagaaggggaacggacgttcgaagcttaaacgcgcacacatttgcgtcacggaaggagcgaaaaaaagggagtggggtccttctttccaattagagtggggcccataggtcatacaattagggacatatctaatgagtgtaactttttactggggtctaaggccccaattggtttgtacgttaaatccgcccctgattaattgtgtcattttctcaagacaaaaaaataaaatggctagtgccgtcttgagcaatagtactcataaaatggaccaccctttgtacagcttaaacctagagtacatgtatatgtatatactactccctccatcccaaaatataacaatttttagccctcaagatttgtctcaaaatataacatcttctccaccaacattttcttcccaatcaatacaactctccaccattcacttttccaacctacctccactactcaaccaatcacaatcctccaccattcacttctacctactttcttaataaccgtgtctaactctaaaaatgtttatattctaggaaggagggagtagtatatgtagattatgcgatctattgacatgagtgctaagcctaacatgatcaccctaatgcggaattcttaggttactgaccgttgtttgaagccattgatgcggttctccctgttcttgtcggtgtagaggtagtagtggtagcagtagcagcgtgagcactggcttgatcccgaaggggtcgccggcgatcacttgcgaggtagtggtggccttccggtcgccacctacactgtccctgaaccaccacacgttctccctccagcgctcaattgatcggatagggttttttttgggattttcggggagaagaaggtcgtgaagagatcgtcatctcaccacgacatcggcctcccctattagtatggcactgagggagatcgggggcaatccaaaatatgaaaagatttggcgctaccgatcaatgcgcgtaatcacgtaattatggaaattgaatcgcattaatcccgtaggcactgggtggaaaacggccatccgagatttcctctcgatttccatgccgagagataaactttcctaacagtatgtagggcttgtttggattagcttctagcaactacaacttctcacaaaatctttaactcctacaaatcatcactcagattttaagaatttgtggttgtaaaatttagaaaataaactagaatcaaaagctaaaaatctcaagttctttggatttttagactaccaactaacaattcaaacttaaactcccaagcagggtcatatactactatatagtatgcatttgagagtagcagcacgccgtaggacccagcagcaactacccatacattgacattagagtattcgacagcttcctaattagtatttaataacgtacgatgaaacaacgacctgattgtttcttggaaataatcgctctttttcttggttggcttggctagctgtttaccgctctctccgtcctattttaaatgtaattataagttaccgtgttcaattttaatcgtttattttatttaatttttttataattagtatttttgttattatgagatgataaaatatgaatagtaatttatacatgacttatgtttttaattttttttagaaaattttaattaagacagacggttaaagttgtgtacggaaaatcataactgtacttaattaaaataggacggaggaagtaaaattaatatatacatgaggtcgtccaagctagcgaccgctaccttgtgattgattgacatgtaataccaatttataggttatttaactaacttataattaatgtttatattgaacatgtatattacaactttacaactcgtatcaacttggtctcgctgtttccactaaaaaaatttgagcagcaccgataagatggttgtgaatcttttctctaattatctgtgagctaagcttgatagctagatagctagataggacaactcgtgattatataaaatttccatatgttagcgtggacctataaccgttcaataagccacttgttttacgtaataaaaaacaaaagccacttgttcgatcctcttgtcgtgaatgcgtgcacaaaactcgccggctgcctggcacattttcacccagttatagttattattgaggactaattgaatgattgtattttgctatggataaaataaatattataatattatataaaataaataaaacatatttttatgaaatgtattgtctataagtttgtataagtttatcgtagtgaatgttcacattaatttgattttatatgccactaatttaattgctttaataataagaagtttaaaggaataatttataaaactataacaggagtgatcgagttgacaaattcactaataacactactaccttcttctaaaacagtatagatatttattttcaaactatgtactaatctgtagctatagagagagtgcatgcctttgatatataaaaagaccatttcttcctcgtgtgtcttacgaagtgcagcagttgagtactgtgaaggtcgaggcaaagttgatgtcccgttgtcctgaagattgtccctttagcaaaatagcaatccaatcagcgttgtcttgttgtcaagcagacaaatttaatcatgtggacaagaagaagagatggtgatgaacaatacggtaggcagccatcaggaaaattaatttattcgtcttatatcagaaaaaaaaagtgagaaagatatctgtggaacaacgatggtgaagatagctctcggactgatcggttaattgatcgttcaggctttattattggtatctctattcctaaaaagataggatatatacttaggctgcgttccttacattgggttgggaacattacccccaagcacgaaaaacggagcagttcattagcacgtgattaattaagtatttgttaatttattttcaaaaatggattaatataattttttaagcaactttcgtatagaaactttttataaaaaacgcatcgtttagccgtttaaaaaacatgcgcgcggaaaacgaggacatgggttggtaaccccttgagccgaacacagccttactaaggaatttagtattaattatgtaaagagaaaaaaggttaatcgttcaggctttattgttggtatctctatttctaaacctaaaaagataggatatatactcgggaaggaatttagtgtcgtttatattaaaaaaaagatatacacttaggaaggaatttaatatcaattattaaaagaggaaaaatggtgagaaaattagtgctaaaggaaatagaagattggccaactggagcaccttgtagttccccaccatcagaccacgatgtcattaccggtatttatggcgaaagtgtatgtaaaacatggctaatgaataagaaataattcctccgattcacgatgtaatactttatagcattgcccagattcattaacatctatatgaatatagacaatgctagaaaatcttataaattacaatatgaaacggagggagtgctacttattgtgcttgctcggcggcgtcgccaggtagggtttacattaccggttgatcactaaatttcgagccccattagtatcacggttttcaataaatttcgatcggttttcgataaatttcaactgaatctactgtttaaccttcgaaattccaatcgaaagttaattccgagccgtgtcgaaacgttgaaatttcacggaattcgaccggttttcgtcggaattgacgctaggtccgttaatatagaagaatttgcatgaatcaaatagttaagaaaaaaaggttattaattttgaatttgcaaaaagaaaagttcatgtacatgatcttgaggacacgcatcccaaaattcatgcggtttgaatctagtctcacatttccgtgtttcttccaaaactgaattcttgtgtgctgggtaggttttgaaatggactgaattgtctatacacgtagcacgtagccatcaaaccttcgtggcccgtacgtctagtatgcaatgaaaatggtaacacgtatatatttttaactcgtggttgaaatttgcaaaccacggcggacaccatcaatctttttctcttttaccattttgcttacgtgtcagcgtgcattgtgtatgcctaactacaaaacgacgaattaaatcaaacaaaatttggacgaaaatgacagcgccactatttttatttactacgacgcttaggtaaaatcaaaccggtggcaaaatacttgtagcaattaattacgccaatggcacagtttgcatataaattgcgagacgaatcttttgagcctaattacgtcattatttgacaataagatgctacagtaaccatttgctaataacggattaattaggtctaatagatttatctcgcagtttacaggcgaaatctgtaatttgttttgttattagtttacgtttaatactttaaatgtgtgtccgtatacgttaaattttattttgccaaaacagctacacaaatcaaacaaaattttgacgaaaatgacagcgccactatttttatttaccacgacgcttgggtaaaatcaaaccggtggcaaaatacttgtacgaagtagcaattaattaaatctgtccctgccgcttacttaataactaaacgctgcgatttatgattccatgcgtgacgtcacgccttagccgctcgcgccttcacctcctccacgaacgcctccacgtggcggtccgacgagccgccggccgccacggccgcccgcgcggcggcgctccacgctgcggcgctggaccgcatcgcgccggcgtcgggccccgccacggcggcgtcgacggcgtcgcgcacggcgccgcgccgcagcggcgcgcggaggcggacgcccatcccgagctcgtcgacgaggaacatggcgtcggtgcactggtccccccactgcgggaacgccaccaccggcacgccggcggcgaccgtctccagcgtcgagttccagccgcagtgcgtgaggaagcacgccacggcggggtggacgagcacttgctcctgggggctccatggcaccaccatgccgcggccggcgacggcgtcgaggaacccctccggcagcagcgcgcggctgtccggccgcaccacccagaggaacggccggccggtggaggcgagcccgtgcgccatctccgccacctcgccggcggacagcaccacgacgctgccgagcgacgcgtacacgacggagcgcggagggtgttcgtccagccacccgacgcagtcgtccgctgccctgatcatgtcgccgcgcaccgcggcgtcgccctccagctcgatcagcgggccgacggggatgagcggcggcggcggcggcgacgtcgcgacgccgcggagcgcgtccaccacgtcgcgctccagctcggtgaaggagttgacgaacacccacgtcgccttgtcgatggtgcggatctgctgctgtatcgcctccgtgaggctcatgtaggggttcgacgggaggaggaaggacggcacgtcggcgaccgacatcgccgggagccccggcagcgtgagccgcgcgtcgaggtcgtcctcgggggggaactcgacgaggccgtggacgcggtggtagtagagcgagaacacggcgcacgactgcacccacagcacggccgacaggatgccggcggcggcggcgacgtcgaccgcccacgggatgaacgggttcccgacgacgcacgccaccggccgccccgccgcctcctgccgcgcgagcagctcggcgaacgccgccggcccggccgtcccgaggtgccgcatcagctcgtcgaggtcgctcccgtcgaagccatcctccaagaactcgaacctgatccggccgccgccgagcggcacgccgtcgccgccgaccgacacgccggacgactccacgagcttggcgccgatggcggacgtcgacgagaacgtcacgacgaggcccttcgccgcgatgcgcttggcgagccggagcatcgggttgacgtggccctgcccggggaagcagatgaggagcaggtgcggcgcgccgccgctcgccgccgccgccgccgccgccgtcaccgtggccgccgcggcttcctcgcccatggctaagcaagctaacttagctagctgcgagctcactattttcttctcgccttttctccgagcagctggcgtgcagtgatcgatctctcgatagctttggtctttgatactgtggcaagtgagatgaggcaaccaaatttataccaaaaatttgtgacttgcagatgaacacgatgacgtctgacgtggcgtcacacatgtaaatacaaggcagcggtttatgggctacctattttattttctttacatttaaaattgaatactatctggtcccgctgtatccaaagataaacgtgagtgtaggggaaaaaaagataattgttaattatcatacaattaaagcttaggccattttgtgtatcaatagtcatgaccctattaaaaacaaatagttcaaattaaagaagatattgtgggtttttttttttggttgtgtatcaatttgtcattaatgtgtgcaatgttagattattgtagttgcaggaatagactacgagtggctagtcactgtctcattgttttggtaaagggacatggcaccaaaaaaataatctactactatagctaagggcccatttgaatcgtaggaatgaaaaaacggaggaataagaaaaatataggattatgataggaatgtaagtgtaaaacagaggattgcaaaacacaggaatgatcgtttgattggaccacaggaaaaacacaggaatcggataagagagatagactcaaaggatttttaccaagaggttggacctcttgctaagtttcctccaaaacctatatgcaacaagccattccataggaattttgtaggatttggaaaacttcaatcctttaaatcaaagagctatataggaaaattttctttagaatttcaatcctatgaaatgtcttcataattcctttgattcaaacgggccctaattaattagatgcacaactgcagcaactgtcaggacatccatgctgttttgctgatattactgtcacattgagctgggtgtttatgatagacattttagaatggatccttaaaattttatcgggttttaaaattaatttgtttaatagaaaaacattttcaccatccaaaataaatatactgccagatacacgcatctgctttcttcacaaaaactgaatttagttttaataaccgtcctaactattccctatgtaaaaaatactctatatatatatatatatatatatatatatatatatatcttatacatattaataaaaataaaaaatatatcttcaactttcttaaactccaatacatttgtcctctaccttctcagatcaacctccaaaatattatctcctactatctcaaacttaatgtattaattgcttttaaaaaaagatcttcatagaacaaatggaggacagaaaaaaataaagtttttttttagggaccaaggaagtactactctataattaagtaactgtcagaagtaaatgcaagccgttcttcttttcactcgaaggagactgcagactattggagtataagggggtgtttacatgcaggggcgaaaagttttaccatgtcacatcagatatacgaacacatatttgaagtattaaatatggtctaataacaaaataaattatagatttcacttgtaacctgcgagacaaaattattaagcctaattaatctatcattagcaaatgtttactgtagcacatcattatcaaatcatagagcaattagacttaaaagattcatctcgcaaattagtcgtaatctatgcaattagttattttttagtctatatttaatacttcatgcaggtgttcaaacgttcgatgtaacagggtgaaaaatttcgagatgggatctaaacaggcctaagtacagcggaaagaagcatgtgcttgtttcccaacttgaaggacctcattaaattcaaatcaagtggtacttcggcggtcatgctatctcggtcaagcgaaagggcacatagttagattgacctgagtaactcctttaaatcctaaatcctaagtttaaatccttatagaaacgaatgtcagctgattagattgtttgatagctaaattatcaattcaaaaggctgtatatatatagttggatatagaaacctatccttctgttaaaaaaaaatctcgttcaaaaaagacttgattttttcttcacatctgacgcataccaaataaaaacaaaaaaaaaattactcatcacactgttagattccaaatttccaatagatttgtcacacactttcttaaactctaatatttttatatttatcccctactatttcaaacttactagtacgtattaattgctttaaaaattaagtaactgtcagaagtaaatataaccctttttttacatgcagactgcaggcatgtgtgagggaatcctttggggaaccggtttctagaagggcgatggagaagctagcaaagttgctattggatccactagtttcggcatgaagagcgacctcacgagctgactgaaaatttgggccgactcgattggctgtggaagaggataaaggatacgtggatgcgagacgccctcttttgtgttctttttagagttaattttagtttgggccaccttttattaccgatgtttcgctttagatcatcttaggactaatgtttttattttggaccgggtatttttacctttgtttcacattggaccaccctcactcttttatccatctacatccaacttgtaatatgtcgaagaaatagtcttacatatagctgtggtagttcattgacgagtagaagacggcgtaatcgagatcgttcatatgcttgagaagagagttgggtggtccaaagtgaaacaaaggtaagtttatccagtacaaagtgaaaatattgcttaaagggtagtccaaagtgaaacataggtaacaaaaggtggctcgaagtgaaatttactcttctttttattttttttcctgtacacagggagtacaccctagaccttaaaaaaagaaccttgctatacgtccgatttatttgttcgaccagtgtacgactaaacggaacagctcggcgcgtgatggcgtgaggcaagagcatgggttggtcatacggacatcgacgccatgcacttgcgtgcgttacagtcgtacaagagtcggacaaagtagtcttgtgtatagcatttttctaaaaaaaattacttcatccatttcaaagtataaaaagtctggacataaatgagatatttcgtaggacttcgaatttggacataaatgttccatccgattgtagatccttatattttaaaatggtggtagtaaatcttagctataaatttaaacatgtgatcaaactaatttgtagctaagatttaaattttattggaacaaaagaaatatattgctagatggtcaacttagtacaactttgttaaaaccatgtaatgaagagcgtgttccgcttcgcgtttgtgggatactcctttcgtcttataaaaaacgaatctacgatcggatgtgacatattttagtattacgaatctggacatatgtatgttaagattagtagtaataggatgtatcatatccggtactaggtttggttttttattaaacggagggagtatatttttgtgtagagacatatcatgcggtttagctttagtaatcatctgttcgtactatactgtctaagtgtgcatctatcgtgtactccctccgtactcgtaaaggaagtcgttttggacagcgacacggtctccaaaatacaactttgacttgtttctataaaaatattatttgaaaagtaatatatgtatatttttacgaaattatttttcaagacaaatctattcatatagtttttatattttcaaactcaacaacttgagagttattcatgaactcgtaaaggaagtcgttttggacagcgacacggtctccaaaatacaactttgacttgtttctataaaaatattatttgaaaagtaatatatgtatatttttacgaaattatttttcaagacaaatctattcatatagtttttatattttcaaactcaacaacttgagagttattcatgatttatattcccaaggtttgacttaaatattgtcctaaacgacttcctttacgagtacggagggagtataaaatagcattgatagccaacaacataataatatgtgacttgtatgtgtccagctaagcacaataaaggatcaacccgatccatgtcactataaattctatggttttaaatactccctccgtccctaaatatttgatgccgttgatttttttaaatatatatgatcgttcgtcttattcaaaaacttttataaaaaatataaaactatatatatatatatatacataaaaatatatttaacaatgaatcaaatgataggaaaagaattaatagttacttaaattttttttataagatgaatggtcaaacatgttttaaaaaatcgacggcgtcaaatatttagggacagagagagtattacttaaaggatgctatcataattttagatatgtcactacttatacccttcaaagcattataatacttttttttaacaaactaccctctttattccttcttcctcttcgttggatatgttcctccagcgcaaccgcctcaggaaccgaaaaaagagaaaaatttcccagccgcccaacgtcacgatgtcctcacttccaaacccaaacggcaaccggcggctaccaagcaaagcaacgcccctgctccaggacaacagagcgaggtgaggatatggtgacagcggcgccatcatcgatcgcgccggtagacctcctggcaatgcaccctcacctccctatcttgtcgatcgtcgtcctcctcgatcaacagcccacctcttcttcggtgatggataatgtcgctatgcatgcagcgcgaggcagattagttagatgggactaaaacttcttttaaagactattaataaaacccatccataatcttaaactaattcacgagacgaatctattgaacctaattaatccataattagtctatgtgatgctatagtaaacattctctaattatagattaattagacttaaaaaatttgtctcgcaaattatcttttatttatgtagttagttttataaatagtctatatttaatactctaaattagtatctaaatatagagactaattttaagtccttgatcgaaacaccactctggtgtgacgagaggataagagacgagtccaacacaccccggtggaagcggaccgaggaagagtctgacggaggaggatatctccgatcgatccagatcaagctcgtaatggagcagaggctacaccgtccagtgattgaggacagtggggccactagaccggtggctccacaacacccggagccacgaaacggcatatttacgaaagaaaattaatttgtgaataaaaattttagggagtagttatatttatggcgctatatttttcaaaaaaaaatagtcggtatgtatttacattgtaagtccctaaattacatatgtaattttagtatatctacaagtatgtactaaaattacatactaattatatatgtaagtggtgtgtaagtgtggtgtaccagtgcaatgttaaactttaacgctaatcaaccaagaagatttgggcagcaatgtcgcccggcgtgaaaacatccaacgaccagcgaatactcgtggagcaatcgtacggccagcgacaccgactaaaatcagcccaaaaaactgtcgacatatttttagcaattctgaatttttatatatgtgttattattgatctaaaagtaaatgctgaaaaataaacttcgatgaaaaaaccttaaaattatttagattgaaaattcaaataattgacttataagtataagcataaaaaaaaagtctgccatccccaacactgccgccatggctgctcccgcttgctagtctctctggtcactgccggtgtaatcgatgctacacaaacattctcccagctccgagctgacaccaagctcctcttctccgactccgagcaatcaccgtcgacggccactttcctctctagaggaggaagggaaggaatgctctgagctcctcttgatctgtttggcagcatctagtaggacaggacaggagaggaagaaataaggaggaggacaatttggtccaacattttaatataatacattaaaatggtaagtagttacatgcctccaatacatataaagttgtaaatatgcaagttacaatgatatattttaaaaccaaaatgtttatagtggtacaagtataattaacatgaaatcttatcttatatagtgaaagcaaccatatttcttacacgagaacacgtcacatcatcgaaaacttatcagccgttaaataaagagtttagataaataatagccattggataaaaaagttacatatgcactgaaaaaacaacaattggattaatgtatggaaattttcggaggtttctagtgtctccttttagacacatggtacaaagagagagaggggcaaagataatgaagaaaacaaaaaccacgaagcttctagtgatttctcatatagtatggtttagttaaatctatagttagctagaccaatagatactttgtaaataaattaactcatgctaaaaccttctgtaactaatagatcatatccaataaatagttcttatacaaaataaaaagtcgcgcaacgcacgactacgtggcttgtaaatatgaaaatttcacttagatatatgcctggttatgtaacacttcatctattccaaaacaaattaatctagtatgagatatgatttatgaaactggacataagcatgtattaggttaacttattttggacacatagagtactacatttgtatctttagggcttgtttagttggcaaaaaattttgcccctgcatgtcacatcggatatacgaacacacatttgaagtattaaatgtagtctagtaacaaaataaattacagatttctccaagaaactgtgagacgaatttattaagcctaattaatccatcataagcaaatgtttactatagcaacacattattaaatcatggcacaattagatttaaaagatttatcttgtaattttttggcgaactgtataattagttttttctatatttgatactatatacatacatgtatccaaacatttaatataacaacgtgaaaatttttgtttaggaataaacaggccattactcgtccacgcaacaatggccaagacttctgaataatattttcggggagtaggttaattaagagtgtatacactcaattaatttcatggtataccgacaggttctcggggtgagcttattttatttcaggataatgatgtgcaaccaagtcaaaccatcttggtctcccaaacttaatcatatccaaagtcacgtggtttctagtgactgtcagtcgatggggtgcccatgtcaaatccggccattggtcctggccactgtaaccgcacatatcactgacatatgtgtctcattacttccatactagtcgtgtggtgtttggattctgacttaactttaatctttatatttagacaccaatttagagtattaaatataaactatttacaaaactaattatataaatgtaagctaatttgcgagataaattttttaagcctaattaatttataattagagaatgtttactgttgcatcatataggctaatcatggattaattaggcttaatagattcgtctcgcgaattagtccaagattatggatgtgttttattaatagtctacgtttaatacttataattagtgtccaaacatccgatatgatagggacttaaaagttttagtcccatctaaacatgggctaatagtcagatgatacctttccatgattattttctttcattttttaaatgtgtcagggttatggataccacatacctaatagtagttgactaaatctcggcaggacccaccatataccatgtctcatacggaaacaaccttcggatataggaggagttccgcataaggaatgatgaatagagttctacatgaaaacgataaaggactactcggattttattcatattggtctccttagttctacttggacaagaggacacctatgggtataaatacaagaccccctaggaggagaggggagagggaacaatagatcaagacacaagatcaacatacaagccaacatacgccaagacaagacgccggatatcgacttcagagacaagcatagctagtcccctacggtgtctacggatactgtcaggagagacatagcgctgtcattgatctcgccggatgtggattcgaggaggaaggctaccctgttgtcgactacgagtcagcacttcagatcgccaagtcgacaacagttagataggctaccccaaatattgtactggtgtgattatgatgaataagagcaatgaccagcttcggtcaacaggagtagggttattacctgacaattcaggggcccgaacctgtataaaaatcctcgttcccatctcttttacctcaatctcgcatatatcctagtaccaataatccccataccatgcaaataccggaatcgcgacatcaaacgtagacaaaatgcaccttagatttctaatatatatagcaccataaaattttattacaagctttgatcgtgtgtttcatttaaaattttgaggaaatcttaaaaatatgctttaagttcatttaataataaatcaagctacaacaaaagaaaaatgtgtacttccattttttaataaaacaaatgatcaaacatgatgtaaaaagttaaaacatcacatattaaaaaaagaaagtagtatatcagacattgttgaccttttatatgcttaatcatttgtcatatttttttaaaaaataaatttaatttaatttattatggatttatttattatgaaatacttttaagcatgatttattttttaatgtttacataaaagttttaaataatctgaaaacttttataaataaattaatgattctattattgaaagtaaaatactacaaaatgatattctattcggacgggacgatatctttaaggtatcccctaatatctggtaggtaggtatcggttgatacctgtttggacgggatgatacctttgaggtatcacgtgatacctggtagatattagccgggatgatatcaggtatcaggcaataccttagaagagacatcgtttatcgtctggtggcattccccttatttttaaataaaaagaatggaattactcccgtatatatgatggtctcttcctggctcgcgcgcactcgtgatcccctgctgcggatctcagtgatgtttagggatcgaacccagcaatgcctatgcccctaccactcgtcgtactaggtagtcgctgtcaacctccgtccgtccgtccatccgtcttgcggctggaagctgggttttaccagtcttcacggcgcgtgagtacgtgtgtgaccccagccgtgacgccgcctgcacttgacgccaaaaccctgccgttccttgccccactccacgactcctctagctcggctaggacggctagtgcgttataatccctgcgtttaataatatatagaattttaattagatgtagttcagatttattgtattataatgtgtcacatccacctaaaatctcttgtattatagcacggagggagtataaaaagagaacttacttccttaaatgaagtaaagtagtaaatattaggaagtcaatagcttaattttgatgagtctttccaaataaatacaccatcgttaacgccgttaacgttttaggttttatggaaaccgtcaacagactaacagaaatcgataaaatccaataaaaaaattaaagtttaacttgaatttttttctaacttgataaaaaagtttttgagtgatttgtgtttaccgaaaaaccggttggcgtcgtgggctttgtaaacccggccattgttccccctcctacctcgccaaggtgataccgatgcgaccatgtacgtagtacctctcgtcctcttcaccacgcacacccgcgtagcgacacgcgcatcacgtccgttccgcccacgacaacgactagcaattgcctagcaatctactcctactagctcgctgtctcactgtctcctcactagcttagcttaaattagcttggcttctggtatttttggccgtgtttagttgtttggtcaaaatttcttttgcgtccgtatgcatgtttgaaatattaaatatagactaatagtaaaacaaattatagattccgtctataaactgcgagacgaatttattaagtctaattaatccgttattagcaaatgtttattatagcatcacattgtcaaatcatagtgtaattaggtttaaaagattcgtctcgcgatttacatgcaaactgtgcaattggttttttttttccatatttaatactccatgcatatgttcaaacatttgatgtgacggaaaatgtgaaagttaaaaaaaaattaatctaaacacggcttgtattggatccctgggtctccatctggattaattaattttactactatactccgtcaaatggagactttgatctggatcgcgacaaacatataccgcctgcttcttcggttgcgtatgtagcagatgaaatttgacggaatatgctcgaattctaaataatactccctccgtattttaatgtatgacgccgttaactttttaaccaatgtttgatcattcgttttatttaaattttttgtgcagatatgaaaatatttatatcatacttaaagaacatttgatgatgaatcaagttataataaaataaatgataattatatattttttttaataagacgaatggtcaaaagttaggtaaaaaggtttacggtgttatacattaaaatatggagatatatatactagtagtattacttgttgctgctgcggcctgcagccaacttgtgggaggagaattcgacgacgacggcagcggcggtgtggacggcaaatcgttgttggctttcccatgttcgggaagaaggcacgcgatttgttggagaccatggagagagaggtagagaggaaagaacacacaccaagtacgcaagaagtttctgcgtcgacgtagacactatatatattctggccagtttttatttttgttgctcttgtgattacgccatttcgattgtcttttgcttttacattcgtttgatctggtatatgcttgcgtggattcaagagctggcagagctttactatgcggctatgccgtgatgacttgggtcgttcgttggatagatgtattcccacaaagtgttaactgtacccatcatagcaattcatttttgctatatatctgtcgacaaattttctcctgaaaatttgacagatataattacaatacaatcgtagtgtaattaacttgtatgtaattacactataacttgtatgtaactttcacataattttaaaccgttagatttgtttcaagatttgtacaagtgaagaaggaaaaaagtcgctgcgtgcacatatgtgagaggatccattcccacgaccttcgtttcatcgaaatagactgttatagagagatttttaaaagttacatataagtagcatgtactccctccatcccacaatataagggattttgaatttttgcttgcaacgtttgaccacttgtcttattcaattttttttacaaatataaaaaacgaaaagttgtgcttaaagtactgtagataataaagtaagtcacaaataaaaataataatatttttaaaaaaatttgaataagacgagtggtcaaacgttgcaagtaaaaactcaaaatcccttatattatgggacggagggagtaagttacagtgtaattgcatcacgattgtattataattatatctgtcaaatttttaggagaaaattttttaacaaatgtataggtgatcccttcattgtatcctatgtaatttttttcatcacgaaacaatacaatgaattttgaagaaacgaggaacataggatataattgtggatatatgtgtaaggcctttttagggtaggaggagataatactaattttgaaatattaatactatatttaaactcctctctattaatataatgccaatcacctgattggccgttcgaaaaaaaataatactacctatgtttcgtattatatatcgttttgactttttcatagtcaaatttacttaagtttaattgagtttattaaaaaatataatagtattttcaatacaaaacaaatatattatcaaaatatattcaatgctagatctggttttattggatgttctagatgtatatataattgtggatgtattcgtttttttagggtagggggagctaatactaattttgaaatattaatagctagtagtaatacatagagcacggctaatattaatagtccatttcatactgcagtattattttggcccattggcgaggaaagattttcggcttgggcactttgggcaccaagcgaggaagacaaaacattatttatttatcaacgaaaggtgaaaccggtgttgaaggcccacccagaaattaaaaagagtagaaaaacatattgttcaagcagaaaatgctgtatctcatccgatagtatatagggttatagtatgtagctcatttaaaatacatgatttttcaggatagttcggatagttaattttcttagcgaatttacgataagtaattagtaaaatcctccaaatccctacatgcgatttgttttaggtgggctacgatatacaagagcccattcacaacatggagaatgggccttagaccaatccgaaggctgctttcgttttgtgctgttgggagctatctctacgcacgtgaaacaaaacaactcattagcatatgattaattaaatattagttattttttaaaataaaatagattaatatgattttctaaagtaatttttctatagaaaactttttcgaaaaaaacatcgtttaatagtttggaaaacgtgcgcgtgcaaaatgagagcggtgagtcgggaaagaacacacccgaaatcgagttaatcagtacttcagtagtagttcgtttttccttgttataatctcgtttcacagtttggaggcagaattttgaagtagacttatctaaaacttatttcgttctaaaaaaaatctaaaacatatttgttcatgcggatgaagattgaagatgttgatgaagacgcggcgtgcgcttacacggatgaagataaacaacgttttgtgctcatttacaagaggaggaagaactgaatatatgagaggtgcagaagtgccaagctcaagagttattcagaagaccagaacctgaagataacttcagatgataaaattctgaaggatgactgtgcatccgtattcaccttgttcaaatcagatacactagaagtttcagagacgcagccagaaactcataatcaccggaaaatttagctgaagattgtctgtgaaattgcaaatcgacaacctttttctgaattctgaaggcaaacaacctggaaaaggttaggctcaggttagtgaaatagaatttctgaatatgtaaaatcaatctaggtccccctcccttcgtggcacaaatcatacgatcttcctcttcttggcgcgcactcacgctggcgcaggccaggaagagatgaagaggtgatgtaaaactgattacttttacattttatacctttttaaaaacttattttacaaatacactcttaaaaacttattagatcattggtgccatgatcttgttacttacttctatctattaaacgttacgggtacttagttaccgtgacttaatcatgctctgtactaaacctttactacgtagttcattcaagctatactgacctttccatgatttgtactcatcacttgcctcttcgcttagtgcactcgaaacagagcttcaagtaagatgtttgtggaacatctctatagtttgtcttaccctaacatgacaacgccagcgccgttccccttatcccccagaaagctaagccatcaatgtgaaggggatctgcgcaaatgacatatttgtaaaaaaatataaaaaggacaaacatgtaaatatatctttttttaaaataggttatcggccaatgaaactgatgtctagaatctatttataaatatatttttattacaaataagttattttcaaacaggaaaaaataaattggtctttggtgtcgaccctcttcacgctaatgacttaacatgaataacgccaataactctagccacgaaaaatgtttatttctgaaataatttttttcaagtgtttatttgtaaaacaaattttaaaaatatcaaaatgttaaaagaaaaaaaatcggagtgatgtaaaacctaccgaacccacaaggagaaaggacgaaagcaacatgagaattgaggaagtcagccacgtcgccggcggtgtcaagacgccccgggggtcaaacgccatgcacacgccgaagcaaggaatttttgcgacacggcgacgacacgcacaatcgtcgcctcctcaccagcggcacaaccacgcgctgtaagctgtaacctgcctaacctgcgcgcgcggtatgcaagaaaaatgaaaaaaagaagaaaagaaaatccacaggagccttttcttcccgttctttttccatcggcaaagtgcacagatgctttcatcaagacgacaacatccccggtccggttgtaactcgtaatccatttgtcccataaaaaactaacctatgctaaatgtaacatattctagtaatacgaatttggatatacctatgttcagatttattgtactagaatatataatatccagttctagatttgtttttttcgggatgaaacctctctgaacagatttgtttccctgtcaacacacacagtgatctgatctctactgatcgatattctttggcagatttggctctccctcccggtgcattggtcggtcgtgcacgggtgtcgccgtgtcggtgtcgtcgtacgtcgcccgccgcgtgcgaatgcaacaccctcatttcgtagctgcaaacagtgcatacgcgccgcggagtcctgcaaagcagcgcagacgggtggtggtcggccgccaccttagctccaaggctttcttcaccagcatgcacctgagccgtccagctgctttgccacacacatgcctctttcgtttcgttaaattctacataaaaaaatatggtacctctaggtatggtaaaattatccttctaattaagatatcgactttattttagttttcattagtatgttttttttaattgctaaatgatacagttcatatgaaaactttgtatatataagttgttctaagatatcaaataaatatatttttaaatttataataattaaaacacaatttatcatacgttaatggttttctcattttacatgctcttatttaatcttgatctgactaaggttcgaagggaccaatatagtaggaacttccaaacaaaatgcaaggaataggggcactggtatcaatttgtttgacaggataaattatcagacttacattttttttaggactcacattgtgaggggttttgttgaacagcggcaactttttttttttgccggaatgaccgaaggaggtcattcaatataattaagattagaagaaaagttttacatcgacagctggctgtcgaggaaggaagtgcaccaaggcacacaccccgaaccatgtaccaaccgcccaaacacacgctacagagagggaagccgagtaccgaactggccgtcgctatgtgagaccgatcgccaccgggccaacaacaccacaacggcgtaaagactctaaaatgacgccctcacgagggtcgcgactccaagagacgccgtcgtcatccgtcccaaaaacgggacaaggttttcacccagagctccttaccgagggaggaggggtacctcaacaatgccctcacgcccgaaagcatagtcactgttggcctaaagattgggctaagctttcgctcggaaccgcctaccgctatggtctgtcgcttaatccgaaaccaccaactaaacatcggcgacacatggcttctgccacacccgaccgacacaaggttgcatggcacaagaaacgaacaacaatgcgggaaaattttccaaaaggttgcatgacagttgatcgtctgacgagtgacgagatctaagataaatctgtcgggagggataggaaaagaaaaggagctgaaaaaaatatgtagtataaatgaccgaacggggatagcaacaaccagtatggacgcctttggtaaaagattcagcattcaacagtttgaatgaatggactggattccattcaaatatgtaacagaaagcgtttgaaagtgcacctcccggtgattattaccgacgacgaatttagtgcgtgctttgctaactggcaaagaaaacaccactgctgaatttactttgagtaggaggtactccaatttaatttaccttcgcaatttagaagcaacgcaacactcagaattccattgactgcataacattaggtagggaaaaaaaagaagagatttttttatggtccagcaaattataccgcttggtactagtaccgctcagtaccagtacaaatctgccgtttgttccggtatgggtaggatcggaagagagtgacaccggcatgcgttgaagcaatcaagtggcggcgagcggcggattttggcatgtgttgaagcaggtcacggcggcggcatcgaactcgtccttcccaatggcggcggcgttgaagcaagcggcggcggtagcgaactcgtcgttctcggcggcggcggcgtcgatgtcgtccttcccgcgcggcggcgtcggcgtccaagtcgtccttcccgtcggcggcaacagcgaactcgtcgttcccggcggtggcggcgtcgatgtcgtccttcccggaggcagcggcgtcgatgtcgtccttcccggcggcggcggcgtcgatgtcatccttcccgacggcggcagcgtcgatgtcgtccttcccggaggcggcggcgtcgatgtcgtccttcccggcggcggcgacagcgatggctgagttcacctccaggagtcagcggcgtcgatccacgaggcggcagcggcgatcgagaatcccgccgcttctagggttcgagctgcccgtccatccctcccgatctggttattgcacacgaagttacgtttttgcccttctacctcagttcttcgtgtggtactggatagggatagaattggtaccgcctggtaccaaactctactagccgttggatcgggccagatccaacggctaggattttggtaccgggcggtactggtaccgaccgctgtaccgtaacaatgactcaaaaaagaaactttgaacataccgcaacaccagtttcccctacatttagaattcctctattaaattatcaaagcaccaagcaaaagctctgaatgtgtcattccagcacaaaacattcagaccagcaccaactgcatgcagatttgcatcatgttaaataaatcaaattaaaacaccagacctccaaactagccatgcatttgcactgcactgcactggtggtcaaacaggaggtgtaaatgcaacgtcagcaagaaaaagaaaaagacgatgatgaaaaggagaggggaaggaagaagattttgttcagaatccgaagaaggttaacgggatcaagcctacttcaccacttttcctccatccattttgtcaactcctctccgcttttcatccatccaaagtccgcgcgttcaattcaacgcacgtctcttgtcctgcacttctgctatgcctcctccatttatatacacatcttcttcttcctcccagccatggccaacctctgccaatcaaacacccttactactcctgctcctacgaccgcgatcttcttcatcttcaagatagctagcttgttcgagtgttcttggcagcgcggcggagttggggatggggtttcggtcgtcgtcgtcgttgtcgctgatgcagctggctgttcttgtggtggtggtgttgctgctttgcacggcggtggagtgctcgaggcctctgcgtgatcacgttggcggcggcggcgggttctcggtggggaggctgccggtgttcgccgtcgccagggccggaccgagtccacgaggccctgggcattagtagtcttgtgttgtggagaactggagacatagccctggggatctcaagctctgtgtgataatcaagatcttctcagttagcttctacactttcttctcagttagcttctacactttgatcttctactgctgctgctgtttaaatgtttaatttgttcattttagtatggatagttttttttttttggcccaagttgtcttgggttcattctatgtgtaggatgacaataaattgtaagttgtaaagcatcaaaatttgagagagttggctcactaaatgttccgtgaaaatctgttaggcatcaagcatgtctcttatctcttatgcaacgaaagattcagtagagaggagaaatatttcattgcacggttgcaccacatagtaggacttgtcattgtttttcttcaaccaagcatagctgcacaagagtcagacagtacacatacgtatatatacatacagagaaaactctgatattgactaagttaaaggtatatattccaagttatgccaggagccacttctcatcgtgttgaagtaagaagcattcatatcatgctgacaagaatgtaattttgattttcatttcagaagaacaaagcaacacgtgtgagatacagttggcaatctagattgctatgtgcctttagtttttttggaagacaaccatctccccagctttggccgagttcgagtatctctcttttcgcaggaggattggatggcatcctctgaatgtgtcctactgttgcccctcaatctagaataggagaaccaaccgctaaagaagcctcccttcttgcgactctcttccatgcgctcctcatcgtgctgataaacatatagcccttcctccaaaacactagtagaatgcctcgtgtcgataaacttatcaccatcatcttcgccgagatcgtccaacaaactccttgacctagcactgaaatcatccaatgaagtccttgacctaacataagaaatcattaggaatgtcatcaattctgaacatccaataaagttgtacaaaatggaagatgtagatcaaatagacgaaaagccctcaggggcgtttgaagctcagggtaccttctgagggaaagggacttgcagggtctgtattcaacagaaagatgctgggcaaaatgaacctgcacaaaagattgaaggcggtaaacacaaggagagttatttagaatcatgactcaatttacaaaggatttcttaagactcgaacagatgtaattagtggacatgcatgcttgaatgtgcttatccagtcaaacccatgtgagctgtaagagtggatccttttcttagtttagtcgttctttacacaaaacagaccatgcaagatctcggtaaccacctaaatctctaagaccaagaaatagaagagatcaaaagtagtgcaagattttgctgaattagatttgctcttaccctatttctgaaaactgaaacaataatttgatgtgagaggaccacaaatggcatcatgaaaagtcaacaggaattcagacaaatcaatggtagtacttgactagagagcttacccacacgcaatagtgtctattctgaaaattgcctaatatcataggcatatcttgtgcatgaacaaagaaattatgcctatttttatttgcaaatacagcaatctatcgtgtactaatgtgtcacaattgcataaacatgacacatactcaagaaaaataggagaattagtcggcactaaagattcatccatgagccaatcacaaatagagatcatgcatatacctcatcaccatctcttataccaaatgcacgcaatgttgccttgtcatctgtcaatttctcgtccttgaaacataagcaaaagtggctccacacgtgctgcctaaaacaagcaaaacaatgcttagttaccaatatatcaacccaacacacagactaaactaaaaaaaatctcaggaaccaccgaaatcattttcacaaaccaagataggaaactataatgaatattagaaattcacaatgtaatgcaaagaggggaaacttttttttttcgccgcatttgttggtacatttgcaaatcaagattgatgtgcatgcagccgtaccaagagatggccttgttgtccgtttcatcgtagagcgcggcgaacacgtcctcgatggccgccttgagctcccacaccgcggctgacctcgcgatttgcacatctacccaagcagcaagaaacgaacgaacacagcaacgcgtcaccccaaatccaatgggaggggattccatggcaagaaggaagagagccgatttggtataccgaagtaggagtcgtcgagcttgcggacggtgaggcggaggcggcgcggctcggggaggcggcggtaggagaagctggtgcggccgcaggcgagggcggcggcgatgcagtcggcgtcggcgcgggcgaagtcgtcgagggcgctctcaatatcgccggcggcggcgtcgggggacggcatcccgcagcatcggcggcggaggccgacgagccaagagagcaagaaagcggtcggccgcaacaaccacacgaaatccactcctccaatcttcggtgaagaagaagatgcagcagccacctcctccaggatcaaaactagaggaaaactggaggagaaatctttccccctccaccgatcgagacccgcctcgcccttcctgctcctccaagaacacaaacaaataataaatccaccgatcaagaaatcaagaaattgaaaaaaacaagaataaaaaagaaagaaagaaatggtatgtacatgaaggctgctgctccaccgatcggaggaggagcagcggcggcggcgggggcgaggagagagagatggttccccgtggatttgtttggaggaggaggcggttgggttgttgaggggggaggggaaggaggaggccgcgtgcggcggcgctgcgttggaagcagcggtagccgttggagggggatgaatgtcgtgccgtttctggggttgcgtgagctggcccgacgacacggagagagagagagagagagagagagattttgggccgtttctgggctcctggctctggttgtgatgggccgaggcccagttgtatgggctcccatatgggcctgattgggcagtccaaacttggtgggctggatttgggttgctgctgccaccgcttcagctctcggccgcccacaccgtcgctcgagcgtccgtcctcccgaccccgctccttgtagacgggctaaggagagaaagatagagataagggagggagagaagaataagggttggagggaggatgacatgtgggccctacatgttaggggttccattattttttttgtgtgtaaacaataaatagacctcacatattttttttaattctaaagtcacataagcaccgtgtggaataaaatctaggtcaacataatcacgtaagcaccatgtcagcgaaactgtcctctaaaacctctgccgggggggggggtcaaattacacttatttcaattgttcgaacagtcgccctacccggtctatttaactcaatgggtaaaaattagattctgcctgcttaaggaagttaaagtgaacttaagaaagttagtttgaggagttgtcctactcgttttttttaacaaatttggtcgttgagatcaaagaggaggcaagaacttagaccctgacgggagcaaagagcctttgtggcctggtccctaatgactcgagctttttctctctttttttaaatattccgtatatgttgcctagatttttctcatgctatattcaatgaaatcggggttgtcttgttcgttaataaaaaaaacggtggacttttttcccaataatggtagcggcccacgttttgtgggccttcataggttgggctagtagctgttcacattgactgggccgatggcctgaggctactgtttcgcctcgttttatcttatccacacaatcttaatcgaacggcgccgccgccgcacgtcccccctctcgccgttcgcgctgctccgccgccgcttatggccgaatcggccttccataggattcgaattacagacgcttcgacgtctatgcccgatccttcaacgttcatctccgacgacggcctccggcgaattcgtggcgctccgccgccggaaatacagagatcgagatcggatgagaacgggaagggctcaatccagcatggatatgcatcgcgatttcaatggctgaattgtgagagacgcgggcacagaaaggcaggcgattatgtttgtagaaatttgttccattttgaatgacgtggttaatatataagtatgttaaagattttctatagatttgcttgtgatcgaagatgaactgaacagaggaagaggcatcctctgctttcatgaaggagatcgatgaacactgaagattgaacaataccgatatattaacaacaacattttggagatatcagctaggagaatcacactctagcaacaattctacatgacattttccatcttgttttcaacctttttttcccctcttctcgatacagagcaagcaatgcaaaatgcaagaaccaatcaacagagctacgtagtcagttaagaagatgatgatgatgacgatgaagatggtgcagccatggcagccttgttttcagtggccgaggatggtcatgtgggtgtcgaacgacggcagctcgtcgtcgtcgccgtcgtctccggtgagggacgggaaggacggcagccggacgccgaaccccccttcctcctcctggttctccggatcgtggcggtcgtcgtgccggcacgtcttgtccttgagcgggttgcacccgtgccccttcgacggcgccggcgccgcggcggcggcgtcctcctcgtcggcggcggcggcgtggccgctggcgtggccggcgcgggcagagcggacggcgatcgcgcacgccacgagcaccgcggcgagcacccacacgcgcgtcgacgctgccatggcggccctagcttcgcaacaatatataccaaagctttcctcggagatgtcaatgcgatgcgcggcgcgatcgaacacggcacgacgacgacgacgacggcgagagggagaggaggatataaaaggcggcgatggaggtgccggatttaggcatggcgaagggttggtcggtgtcgcggcagttgcgccatgcgtgtgtggctgagctccgtcttcacggttacattgggaccgggtgttgaggagaatatatactttacattgttaatcaagaacaataatgtcctctcaaaataaataattatgagcaaatgattctgctatagtgaaaatctctaggatttactcattgctcaataatcttgtgtcaaaaatacaagggaggtatagagttaagtacagtagtttacagggcacacttcatacctagacaattcacataatatgcgttcgcgaaaaagaaaattctcagaacatgtcgtctgtttagctatctcaaatagattcatactcctatgtatttggacattcatcatgtcaagatatatagttaggatttgtctttttttttttgagatgggggagtataaactgctacatccgtttcaggttataagatgtttttgacttttgtcaaagtcaaactgcttcaaatttgactaagtcagtttgactaagtttgtagaaaaaataataacattttcaatccaagataaatttattattaaaatatattcaattattgatttaatgaaactaatttggtattataaatattaatatatttgtttataaactttgtcaaatttaaagtagtttgactttgaccaaagtcaaaacatctttgtcggtgacatgggaccggggatatcttgactagaggtttggggcagccgcggtcacccacgtggcctgaccccctcgggggggtcgggcccgagggtgatgaggccgcccctccctctatctccctgaggggtcgggccgctcccgtttcgtccccgagggctggggcgccccgaccccctgagggtttggcgccacgtgtgtgggttaggtgagcacagcggcgctcacctaaccgcgtttattgcgggttggacgagcgccccacaccgcatttaatgtagcgcagcacactcatccggtccgtgatcggtcgcagtgtgtgaccggtcacagaccggtcagatcgcgggttagggggcaacaggcggcctgacacacgcctcgccccgtcccatcggaatgatgagagcctccaggcactcgtccctagccggagccggcgtgggaactcctggagttggcacgtcagccccggccagatacattccaggcttcatcgcaaccattgtaaggaaatcattgtatgaagaagggcagacgtgtagcatgctaaactgacacgtggtggacaagaatgaccggtctgtgactggtctgatgccggtcgcgtcatcggcaaacaaccgtgcttccacgttgtacctgcttccggcggagtggaggttggtatgacccatcccatcggagggtcattcggacagcagccattgcaaatctccgcccattaatgagggaggacagggttatcccggtgtcaggcaaaagtacgagccaagttttggtcaaagtaggatgggtccccacccaaaagaagggtaggtagaaatggtgtatgtggtatccccttgagagataaaaggaggaccatgcctaccaagagaggggacggaaaaaaagactggagaagacctgagctcgtagaggggactggggaaaaagagtagggagagggtctctagagtttgaactctcttgctctccagctctttgtaactccttcatacacagatccaccagaacacaggagtagggtattacgtttctcagcggcccgaacctgtctatatcgcccgtgtcttgcgcatttgctctctcgcgaaccattccacagatcaagggcttagaacctcacccagcgcccctggccgaaccggcaaaggggggcccgcgcggtctcccggtgaggagccccacgctccgtcatctggcgcgccaggtagggggcgcgtgtgtttttctaagccctcgttctctttcgtgtgcgccaagcttctcccgctcagcccaatggccgaacgggcagtggcgcacaacctctctccgagcgctagcggtgacgacagcgagcagaacccgcgtcgtcgagctcgtactccaccgcccccctctcgccgaagtcttaggcgggaggaggcgctcgagggggacgaaagatccgcgacttcgccgcccacgagcgatggagaaggacggcgagacggggagcgtcgcctcctcgtctacggcgatggcagcacgccccagggcgcgctccaggctgcgggcgcgctcctacgtcacccgcccgtcgtccctgatccagagactccaacccgacgttggctagatgatgtggccaacttggtcatgacggcgcagcagcgcctaggcgccggcgggcggtcctccgccaccaaggccactagcgctgctactgccggctccgtgtcgtcgaggcggagggcgcggcgagcggcggccgttacccaccgttcgtccgccattcccttgtcaatgcctccgacccaagaagatgtgcgtgaggggccggatgcccgcctcaatatcgagcgccggcgcaatgatcgccgtgctgcccacgcatcggagggcgcttcctcgtccggagcgccacttcggtccgggcgcgggggccagccccccgtgtccccggttggcggtgccggctgtcgagcctttgtggcgagccttcggaacgtccgttggcccccaaggttccggcccaccatcaccgaaaaatacgacggaagcgtcaaccccgccgagtttctccagatctacacgactgggatcgaggccgccgggggtgacgacagggtcatggcgaatttcttccccatagccctgaaaggacaggcgcggggttggctaatgaacttgccacccgcgtcggtccactcttgcgaggatttgtgccagcagttcaccatgaacttccagggcacatatccgcgcccaggtaaagaagcggacttacacgcggtacagcgaggggacgatgagtctcttcgctcgtacattcagcggttttgtcaagtccgcaacaccataccgtgcatccctgcacacgcggtgatctacgcgttcagggggggcgtgcgacacaaccgcatgctcgagaagatcgcctccaaggagccccagaccactgcggagctttttcagctcgcggaccgtgtggctcgcaaggaggaggcatggacctggaactcctccggttccggtgtggaagctccggccgcccccgggcccgctgctcggtcagggcgacgggacaggaggaggaagaagagatcggcccattccgacgacgagggtcacgtcctcgccgtcgagggcgcttcgcgggccacccgaaaggggaggcctgcgagcgacaaaaagaaggaggccggcgctcccagtagggagcgcccgaccggcaagtggtgcaccgtgcacaacacctccctccacgacctcgcggactgccgtgcggtcaaaagtttggctgagcggacaaggaagtgggaggaggagaggaggcaggagcgccgtgagagcaaggccccggcggctccctccggcaaccggcgaagtgaggccaagcagaaggcccccgccgaggatattgacgatggcgacgatgacctagggttccaggagcctggggccaccatcgccaccgtcgatgggggagcatgcgctcacgcttctcgtcggagcctcaaggccatgaagcgagagcttctggccgcggcccctacccatgaggcgatgcggcgggcgcggtggtcggaggttgccctcaccttcgaccagaccgaccacccgccgtgcgttgcccggggaggacagatcgcgatggtggtttcccgcaccgtttgcaacgtgaagttggggcgtgtcctcatagatgggggtgcagccctcaacatcctttcccccgtagcctttgatgccatcaaggccccggggatggtgctccggccgtcccagccgatcatcggtgtgacgccggggcacacttggccgctaggtcatatcgacctcccggtcaccttcggcggttccgccaacttccgcacggagcgggtgaacttcgatgtggcggacctcagtctgccctacaacgcggtcctggggaggcccgcgttggtgaagttcatggtggcggtccactacgcctatctccagatgaagatgctgggccccggtggccccatcaccgtccatggcgacctcaaagtcgcgcttgcttgcatggagcagcacgcggaccacctcgccgcggcatccaagcccgcgggtggcgacgagaggctcagcacctccgtcccagccgccccgaggcagcggatgatcacgtgcgacgaggtcccgatcaagcaggttgccctgggcgacggcccgtccaagaccacacgaatcggtggtcttctggacgacaaataggaagacacgctcgtctccttcctgcgggcaaacgccgacgtcttcgcctggagaccggcggacatgcccggggtccccagggaggtgattgagcaccgtctcgccgtacggcctggcgcaaggccggtccggcagaaagtgcggcggcaggccccggaacgtcaagccttcatccgcgaggaggtggcgcgacttctggaggccggattcatccgagaggtcatccatccggagtggctggcgaacccggtcatcgttcccaaggcgaacggcaagcttcggatgtgcatcgactacaccgaccttaacaaggcatgtcctaaggacccttaccccctaccacgcatagatcagattgtcgactccaccgcggggtgcgaccttttgtgttttctagatgcatactctggttatcatcagattcgcatggctagggaggataaggaaaaaactgcattcattacccccataggaacttattgttatacgacaatgcctttcgggttaaagaatgcaggtcctacttttcaacgtactactcgaatttctttggttagccaaataggacgtaatgttgaggcctatgttgatgacttggttgtgaaaacacgcaaccaggagaccttactctcggatctagcggaaactttcgaaagtctccgcaccgcccgcataaagctgaaccccgacaagtgcgtgttcggcgtgcctgcgggcaagcttctcgggttcttggtctctgcccgaggcattgaggccaaccccgagaagatacgagctatagagcggatgcgcccccccagcaagcttagggatgtgcaatgcgtcattggttgtatggccgccctaagtcggttcatatcgaggctgggagagaaggcgctacccctatttaagctcctcaaacgctccgtgccgtttatctggacgaaggaggctgaacgggccctcactcaggtgaaggcgtacctcagttttcccccagtcctggtcgccccggagccagatgagccgttgctactctacctggcggcaaccccgcaggtggtcagcacggcgttggtcgtggagcgcgacgaggacgaccctcgctccgcgcatccccaccctgtgtcgactcgacccgggagagagcagggaggagaggcccccgagccgaacggtggcctaaggcccccgacggccggagctggccctccgcccgcttgtccgacggtgccaggcgcccccgacccccaggatggccccggggccactgcgggaaggccgcgcctgtcgccctccgaccccgaggtcgtcggcacagaagccgagtgcgccccgcgcggcctctcggacgaagagcgccctggagatgcggcccctagtgaagaagatcggccccaccgaaaggtgcagcggcccgtctacttcgttagcgaggccctccgggacgctaagacccgataccctcaggcccagaagatgctttacgctattctgatggcttcgaggaagttgcgccattattttcaggcgcatcgggtcacggtggttacgtcttaccccctcggccaaatcttgcataaccgagagggtactggacgggtggtgaaatgggcaatcgaactctctgagttcgatttgcactttgaaccacgccacgcagtcaagagccaggccctcgccgactttgtggcagagtggaccccggcccctgagcccatctccgtccccgaggccagctcgggcccctcgcagctgcctcacaccgcctattgggtgatgcagttcgacggctccctgtctcttcatggcgccggtgcgggggtcacgttgacctcgccgagcggagatgtcctcaaatacctggtccgcctcgactttcgggcaaccaacaatatggcagagtacgagggactccttgcgggactcagagtggcgactggactggggatccgccgcctcctggtgttaggcgactctcagttggtcgttaaccaggtctccaaggagtaccagtgctctgacccgcagatggatgcttacgtgcgccaggtgcggcgtatggagcgccattttgacgggatagagcttcggcacgtgcccagacgggataacgcggtcgccgacgaactctcaaggctcacttcctcgcgagcccagaccccaccgggcgcctttgaagaaaggcttgcccagccatcggcgcgacccgaccccctaggggagacggacgcgcctgaacggcccccgaggcccgtcggagtccaggcctcgggacccgaggtaagcgctcacagctcccttagattgattgcttggatcgctgagatccaggcgtacctcgcagataagactctacccgaggaccgcgaagggagtgaacgcgtccagcgcatctccaagcgctacgtgctggtggaagggaccctctatcggcgcgcgactaacggagtcctcctgaagtgcattcctcgggaacaaggcgtcgagcttcttgccgatatccatgaaggcgagtgcggagcccactctgcctcacgcaccttggttggcaaggcctttcgccagggtttctattggccgacggctctcaacgatgcggtcgacctggtccggcggtgcagggcgtgccagttccacgccaagcaaacccatcagccggcccaggccctgcagaccatacctctttcatggccgtttgctgtctaggggctcgatatcctgggtccgtttagacgggccccgggcgggttcgagtatctgtatgtcgctatcgacaagttcactaagtggcccgaggcttatccggtcatcaagatcgataagcactccgcacttaaattcatcaggggcattactgctcggtttggggtgcctaaccgtatcattacggataacggcacccagttcactagtgaactcttcggtgactactgcgaagacatgggcatcaagctctgcttcgcctcccccgcccaccccagaagcaatggccaagtggagcgcgccaacgcggaaatcctcaagggcctcaaaaccaaaaccttcaatatcctcaagaagcacggcgactcgtggatcgaggagttgccagcggtactctgggcgaaccgaaccacgccaagccgagcaaccggggaaacgcctttcttcctcgtctacggcgcggaggcggttctcccatccgagctcaccctgaggtcccctcgggccaccatgtactgtgaggctgatcaagatcagcttcgcagagatgacctcgactactttgaagagcgaaggcggcgcgcggccctccgagccgcgcgctaccagcagaacctgcggcgctaccatcagcgccacgtccgggcccgatcactctgcgtcgacgacctcgtcctacgccgcgtccaaacgcgtgctggactgagcaagctctcaccaatgtgggagggtccgtatcgagtgatcggcgtcccccggccgggctccgttcggctggccacgggcgacggcacagagctgcctaacccgtggaacatcgaacaccttcgtcgcttctacccctagtaggggtcgggtgtcaggtctcgggctcgggccaaccccgcacccccccgggtgtgcagggttggccgggggctaccacatgcataagcttatattttttctcttccgtatttcaataaaagcattttcgatttcctaaggactgtgtctgtgtcattgtttcctttcgaagaatcttggcttgaattagcacgctcgtgctcgatcctgccctcggtggcccgggccggctaaaatcgccaaacggggcccagaaccgagccgtgccccggggcgtggtgaactctgggggggggaatcggcaaaggcccacaatcgggtaatccataaccctcggtcaccacgttcccggcttggccagtctcgacacgcggatctccccaggcactagccccgacccgcgccatttgaggctgggacctgggcacgagccctcgttcaagccaagacacagaaggaccgcggcacaaaccatcctcgtctcatacacacaacaaacagagctgacacaaaaatttcctctttatttgattgcagattgaattagtttatacaagaagggggcccgaaggcctcggaagaagaaaggaaaaactatttaagattggcgggggcctgggggctcacttcgaggctcccgggtcgccggcctcgtcgtcgctgtcgtccataccaccgtcgccgccctcctcgtcggagtcgaggacgaacgcgagccgaggggccgtaccctcgaagcagtggacgatgtggtcggcggcgtcccggacctgcgcgcgcgcgtcgtcctcggttccgggagggaactcgtccagcgctgcccacggggagaagtccgggtccctggcctggtagcttgccagaacaagctccactgccccccgggcgaggtctctcgaggatgacttgatcgtctcctcgagctcctcggggagccgctggagagtcccggccatctctgagaggcgctgggcgaggcccccctggttggcggcgtacttcgcggtccgctcgccccagaggcccgcttgccgcccggcgcggtctagacgggagacggcgtcccgaagcatgccgggccctacctcgcccgccaagcggagggcctcgacctccccggcggacgagtccagcgcgccctgcagatcggcgatggtgtgttcggcagctgcgaggcgggcggctagatcgccgtcgcccgcgcctcgagctcagcggcccgctgatccagtgcggccctctcggcgcgggcgccttccagattacggcgcgcctgctcctcccgcgctgcctcgcggagggacaggctgtccgccagccgctgcgccgcggcctcggcctcctcgagagctcgctcccgctcagtgagcgcgtcctcgcggaggcggagtgcggactcctcttcggcgcaggcggcctcgtgcgccgccagcgttgcctcccggatggcgacggcggcctcgcgacccgccagttccctctccttcgtgtccagggcgcaggcgcgctcctccagcaccgtggcgcgagcctcaagggcctcttcgcgctgccgggacgcgtcgagcttcttctctagctccgccccccggctcccgtattggaggcagaggtcgtcccgcgtcgcgttaaacacggcggtggcaatgagggcagtctcccgctcctcctccacctccctggcgatctccgccaggtccctacgacgggcctcgagctctgaggcgtgccggcggtgtgccttgcggcccgcctccaccatggcctccaccgagcgtcgcccctcttcgacacgcgcccacgccgcgtcgagctccgcccgctctgcctgcaggatctccatctgggcacttaacccgtccaacaccgtggtgttcgcggtggccaaggcctgcagaaggggctctgcgctcagtggtgcagcggaaggcatggggaagagccgcctcggtaaggatgccgcactgctcggcccgccgatcgacgtgccggactcagggacgtcccccgaagctggctcgtcctgagcgtcgcccgaggggtcgggcccgagcggtgcgcccgcggcctcgtcgtgggtggcttcggaagtcgtcgtcgcctcgggcggagtcggatcgggggcttggcagcccgcccggcgtgcgcgcgccgcctctgtctcccggacggactcctcggcccggtggagtctggcctcctcccaagcggtttcctcagcctggcgagcccggacaacctcctgggcagcttcctcggcttcccggagacggtttgcggcttctcgccggtcagcttcccgcctccgggcctccgcggtcgccgtctcctcggcctcagaccggctgaacttggaatggcgggaagggcgcgacgggatctcgctgatgcagaagaaaaaccagaagacgaaaaacgggtgagtgaaaacttgccttgggagataggagaatgaatacggccgcagtgggcgcagggacgaacctgcgaggaggtcggctaaacgaccaccttgggggggagatgaggtttccccggcatggttcggtcccccccatcttgcggagtcgcttcttttttcgctccccctcgggctgcgacgtcggcacagcaccctccaggcgcctgctgctggcacgcaccgccccgccccctcggggaggagatggggagggggtatcctcctgtttcctcttcccccgggcgtcggtagggcggctgccccccgggcccccgtcacggggcccagaagcacgaccccctcccggggtagattgttcccccctgcggctcccgcccgcgccatcgtggcctcggggggcccgctcccccgacgccccgacctcctgcatgatggtcaggatgttggcgcgctctggatcgcagcagaggggaaggaccccttgagggatgagggatgcctccacggagctgagattcagcacccgttggaccactatcctgaagtcctcagggtcccagtcccatttgcgcccctggtgggtcctcatgatgtcctcgggcccggtgtactcccaggcgccccgggcgtgccgctggagcggcgcgatccggcgacgaaggtagtcgccgaacaccatggcccccgtgagcccctgggatcgcaaaccagccaggcggtcaagaacagcgtcgtagccgtctcccagatctaccggcgcccgccagctggaggcctgcgccgggggctggctcggaagtcggaggcgcgtttcgtcggcgagaggggtgtagaaccagtcgctcttccactcatcccacttcttgcgaaggacgcagggaatgtagcggttcaacaccggcccccgcggctggaaatagcagccaccgactaccgacggtggcgacaccggctgtacggtgaagaaccaccggaacaaccggagagatgggcgcaccccgatgaacatctcacacaggtgcgcgaagatggccaacgtcattactgcgttgggggtgaggtgcgccatctggagatcataaagctccaaaacatccatgaagaaagaagagaatggcgggaccagccctgccattgcgaagggaaggaagaagacggaccgccccgggtagtgtggcgccgggcgtccctcgcccagctctaccacctcccggccggtggcagattccggcataaatcggcgcggcagcccggcctgcctctcgctcacgatgcgagaaggcggcagcacgctaccgtcgagcggtgcggagccccgtgccataacgccggcggaggaggggtttgagagcgagtgagtgcggcgagggtagggcacaggaaacgagaagttagagcgcaagcggcgaaggcaaggggaataatggcgagaggaaggaaacgaatctcttcctcggcgtctttatacccttgccaaacgctatgcccggctcctcgcttcccgcgcccactatctcgccccctcgtttctcgcgcccactcctccactaatcccgctcgcccgtttgcggcgcacaaggcggatgtgcggccgtggcagtcgagatgggacatatcgtgcgcgcgttaactacgctcgccgaccgatgcaccatcatcacatctccaggcgaaacgaaccggctcgtcccaattcgcgcgctactcaagtaatgtaacggtcttgaagaaagccgctcattattgtcggtcggtttttcccttgccgatgcgcgcgatttgcgaccactggattcctgtccgcctgtagagaccggccccacctgtcaccaggcctgaggagtggcgtcacacccgagcgttttcctcgaggagggcgatcgccctggcataacgccgggggctactgtcggtgacatgggaccggggatatcttgactagaggtttggggcagccgcggtcacccacgtggcctgacccccttgggggggttgggcccgagggtgatgaggccgcccctccctctatctccccgaggggtcgggccgctcccgtttcgtccccgagggctggggcgccccgaccccctgagggtttggcgccacgtgtgtgggttaggtgagcacagcggcgctcacctaaccgcgtttattgcgggttggacgagcgccccacgccgcatttaatgtagcgcagcacactcatccggtccgtgatcggtcgcagtgtgtgaccggtcacagaccggtcagatcgcgggttagggggcaacaggcggcctgacacacgcctcgccccgtcccgtcggaatgatgagagcctccaggcactcgtccctagccgaagccggcgtgggaactcctggagttggcacgtcagccccggccagatacattccaggcttcatcgcaaccattgtaaggaagtcattgtatgaagaagggcagacgtgtagcatgctaaactgacacgtggtggacaagaatgaccggtctgtgactggtctgacgccggtcgcgtcatcggcaaacaaccgtgcttccacgttgcacctgcttccggcggagtggaggttggtatgacccatcccatcggagggtcattcggacaacagccattgcaaatctccgcccattaatgagggaggacagggttatcccggtgtcaggcaaaagtacgagccaagttttggtcaaagtaggatgggtccccacccaaaagaagggtaggtagaaatggtgtatgtggtatccccttgagagataaaaggaggaccatgcctaccaagagaggggacggaaaaaaagactggagaagacctgagctcgtagaggggactggggaaaaagagtagggagagggtctctagagtttgaactctcttgctctccagctctttgtaactccttcatacacagatccaccagaacacaggagtagggtattacgcttctcagcggcccgaacctatctacatcgcccgtgtcttgcgcatttgctctctcgcgaaccattccacagatcaagggcttagaacctcacccagcgcccctggccgaaccggcaaaggggggcccgcgcggtctcccggtgaggagccccacgctccgtcaatcttgtaacctgaaacggacttgtaacctgaaacggagggagtactaattagattatgatagacaattgtacaatgataatggtggtattaaaatatctatcaccaaaattgtggatccccgttttcataacaggaattattcgtgtaaacagtaccatttccctggatcaagtagtctggtacacacgagttcatagctgaaataccaaaagcacatacaagagagtctagtgctaattattacatcataagcccgcaggcattgtcttaaatcatcggaccgagcggtccggaatacatccaaaagcagaaatagataaggcagcggagtttaggcagcggcatgccattgccacaggcaacgaccgtactaagacctactgagcgccatcgtcttcatctccctcctggtagtaggcatagggatcctccgaagcttcatctcccgcttctgattaattttatatttgcaagggtgagtaccaaccgtactcagcaagccaccacagcaacaatgcatatgaaaggggtatttcaaaggatggctatggctcttttgcgcaaagcaagttttgtaattcttttcacaaacctaagacctagcattgactgatcaaattttagtaccagtgtttgtatttaaacaacgacggttctttccaccatccattgtgatcccaaggatagcttcccgccattgagtcgttatggttttctgagtacgcccaccttcccccttctcaggaagtggctccaacagcataaaaattcgtcatgcaacaacccatcccacacaagttaagaatttagagactagccaagtgtaatacatgtcccggtgctcaataaccgcgagcacggctattcgaatagatttggtttactcaccctgcagtggatgtacactttacccacactccgcgactgcccaacacatgagccttgtctcaacacatgagacgcgtcacggcaaagcttttcgataacctcgcattggcagtacccgctccatgaacttttcatcctcatgcaccctaggcgtacacagtttctagcagtgagaggagttctggcgcacccgggaaggaaagttttacacccatgtaattaagttataactaggttcaactccacacacggcagtcctagcaatggcgacaccattatagagcccctgccttacacatgagaaaccactatgcatggataatgcctccgctcggctatttactctgctaggtctatccccattcgagaaatgtggttgtacggggtcgtttcatgcttaacttcatggctcggtccttaattgaccggggacggtactagcctttcccggataccacccaaatccaccgtccgccccggtctaaaacaaatatttttaattcctttcatgtcatcattatcatggcaatgtggtgctcatgtctccacatgccgcatctcaattaacttcccaaaggtaattgcccaagcatataatatttgataaacatgagtatgcaagattctaaagtagcatttctaagcaagtgtcataattgactagggactcatacgtaatcatggttacaaagatttaagggtaaacaataatcaaggcatggcataatcacaagtaggatgttcatcattgcatgcaatcttatttgtaaacaaaaattgatttcgcaattgggatcaacgtgatcaaagaatagtgatgacttgccttgctctaggtcttgtgggtcttggccttcacccggatccgcggctccctcggtctctatagttacgtgcgtaagaacaatttgaattcgattagaattcaaacaaaatccaaataatgaccgaattgaaaaacgagcgcgggaggtgaattctatataggctactttattcgcgaagtggaattattcttctccctaagatattttgtaatttatagtcatgtcctaagactcatcgaattattgagttcttaatcacatgtaaattattaccgcgaaattgatttcttagggagattactaaaaataatctataggaattcatccaattatattttcattaatcttatatttaaatgctagtactttaggtatttaattagtaagaattcatctaactatatttttattaatcctataattaactttcgcaattttacgactataatcaacctacgattaaattcttaactattttgaattttctaaacttctaaattttactcaaacgcctatttattttctttctctttctttttttttctctcctctctttctttttctctctctcctctccttctttttctctctctcctctccctcccggctcattcctccctctctctctcggcttcttgccctcccgggcggcgacaacgatggacgcaaggggggcgcggcttaccgacggcggcgacggcgacggtggcgacgtcggcgcaaggtgcggcgcggagcggcggcttcgtggcggcggcgcggcggctctatgcgacggcgcggcggcgtggaggcggcggcgcggcgtcgtggaggcggcggcgtggtggagtgggtagaggagaggaggtgaggatgaaggggaagagtgggagcagtggggcttatataggggaggggggagagataaggggaagaggggagaggggcggcggcctcatggcgtcagcggggtggcgcggcgcggggctcgacgtggcgatgtgacgacgacacggcgcggcggggcgcgaggcggcgacgcgacggcgtgcggcgcggcggggcgcggggcgcgagacggcgacacgacgggcgtacggcgcggcggggcgcggggcgcgagagggcgacgtgacgggcgagcggcgacggcgacggccgacggcgacggcggtagcggcggtgcgcggcgcgaggcgtggagcacgggcgcggcgacacgacggccgcgcggcgacggcgatgggatggcagcgcggcgacggcgatggcgacaggcggcgcggcacggggctcgggcagcaggcgcgcggggcagcgtgatggcgacggccggcagcggcggcacggggctcggggcggtgtcggcgcggcaatggggcagggttaggctagggaacctcgtcgaacacctggcggccgatgaatagtgacccttttctattaacccgattttggcccatttattatttagatttgattctttaattcccagtttttgcataaataaaatatattcaatatttgtgccattccaacccatggatccattcgagattaatttattccatattttattattattattattgtaatttacttgaatttaactagagttatttcttattccatcgcttttaaatctgagggatataaatatggtcgcggtaatattttactcatttctatcctcaccaaatctttatttaaattgaatttcaattatttgcttggttcattcctaattaattattcattcttcgcgttttataaaccccgaagtcgaaatcaaataaaataatcaaacaaaatcggcatgatgcaatttatttaaaaagtttttgaaggtccatatttttttggaactttgatttttgttggtcgaattttcagggtgttacaaaaatactactcccttatcttaatttgatcatcatatttgcaaatagcgccgagaccaaggcaaaaaaaaccttcttccttaaattagctcattgatcaatgtgtttcttccgcaaaactagctctcattgatcaatgtgtcgtgtgaggcatgtatgtgggcaaacaacaataccatttactcttgcacagataaacgaacagacacagtgatgccatttaggggaaatataagggggtatgaagagaatcttttcactgtaacaaagcatctatacattgcaaacacatgactcaaacaccaagcatagcaaatgagctcttcccttgatatcaggtacctcaaattaaaaaaaaaaaaaaaaagcatagcatagcatagatccaccttaatacccatgggtgtggatcccattataggcatgtgccctatacatttcacaaatctctctattgccttatgcatattaggtggaccccatcttaatacacataggatattctacaatgtgaatgttcttcctcctacacacataaacgaatatacataccactatgccatttactccggtataaataaatgaataggcactgattagatgttgatcaatttggaaagactaaaaaatctaaggcgaagatcaaattaggattgaagggagtaatatattcttgcaaaagccggtgtcacaatgtcgtaagcaagcacttctttatttcttgctaatttgcactttagtcgctctatcgaagaagtcacaaagtttacttttataaaaggttacagaggaaattattattactccctgatccatttttaaatattacattatatttcattatccatcttattaaaaatttagtgtaaatataaaaaataatgacacataaacttattttattgataaaacaagtcacaacaaaacagttttttttcctaacacgaatagtcaaatgtcaagcataaagtagtattttatttacttcttgatttttttttacttagccatctcattatatatggaatgtggtacgatacgcaaaaatgtgttacacatataccattattagtataacataatatcagccttaaaatgccaatttcgccatcaggacaaaccacccttctctgatgcgaggggggcttatcatcatgccagacttatcatatttccttggcaattatagataagagtaaagaaagattgagggtaagataccgggtgattgctttgagattcgtgtcagacgcgttcagatcatgaaaccaggtcctcaaattggaggaggatcaaggttcttgtaatttcctctttaaaacagatacttgagggctggggactcaacgcttgacgtgagattcacgcatggatcgcacgaggtatgctcttcatcttgttgcttcttccctctttgaatttcatttttactaatcgattagctaagatcttggaaaatctcagtcgaaggcgtcttcaatctctggcaacacctcctctggcgaggtggcttgattagaaatcaaggtacgggtagggaaaagaaggagatcaaagaaaactcactggctttgggacctagagggaaattttgggatgtggaagctacgcggtggttggggtagcaaggccacgatgtcacctcgcctcagctgtggtagaggaggagggtggtggacctaccctgacgatggggctacctgtcggagtggttaggaggcagggacagatgtgactggtatatattgaaaggtgcgaggcactggagacttggtagttgaggcggggtggaggaaactaaccggacttgaggaagatgagacatcaagatattggtggtgacgatagaaggggaaggccgacggcagaagcacattgcgccggtgaggcaagtggtggcggcgcatgtgctagggggtggatctagttgggaggagggcaaggtgcttagggttttacatttcacgaacctcaaagcgatctcaaccgtccaaaaattacggtagagaataaaataggcaagcagtgaataaacaaatcccaactatctttgatattgtcatgctatctcaattctcgagtcctcctagtcgaactatggcttgctaggaatcatgactttctcttactaattcttattctttcccatttctgcagcgcaccacctgttcgacgaaacgcctatgcgtcatcatcgaccgccatgaatggcggtttcccgcgcggcaagcgcgggcggaacgccaccgcaaccgctggcccagactttctcagcgccctccccgagggtatcctccaccacatcatgtccttcctgaacgtgcgccaggtcattcagacgtgcgtgctgtcgtggcggtggcgcgacctctggcgctccgtgccccgcatcaacgccaactactgcgagctcagcatgtccccgatcgccgccttcacaccagacaacgaggcggcgttcaagaggttcgtcaaccggctgctcgagcgccgcgaccccgccgccgtcatccacaccttcaacctcagatacaccatttccaacccaaacaaccgcgataacgactcggcggacgccaacaggtggatcagccacgcgttgcagaatcaagctagtttcctcaagatcatcgtggatgcgcacgaattgcacctcgatcacacggtgttcacatcatgctacttgggtagaatcactctcaagaatgtgttcttggaccaaggcttcttcgagcagctggagattggctgcccactgctgcaggatctcctcttgtacgactgcatcattggagatgatgagatctcatctgagaccctgaatgttctcaccatgtatggatgtcagttcccaactctgcaggagagctgcatttctgcgccgaatctgacatctctgatcatgcatcagcctgagaacttcgtgcccgtactggacgacgtcgcgtcgctggtgacggcaacagttgacctgtttcctctcatcgaattttgtgcttatgacatgcgccagttgctctggagcctttctggtgttagaaatttggacctcgattactatgcgtgtaaggtaatgcttattgatcttacatattccctcttgtttagcttggtacttaacagttgtaatagaaaatgcaacctgtctctgacttctcggtgattctttttcttttaattatgttgccgttactagcgtatataagtgagaaataaaaaaggtgacgtagagatggaaaatgcgaatgaaatctttaaatatatattattttgttgtaattttgtgtatatacatatatatgttttaaaaatatttaaagaaatatacattccccgtgtggtagaggcacgtgggaacgatgggaggggaggtggcgtggagccaacacacgcgtgcgccatcgcagtggccggcactgaagcatatggtcccgtgcgaccaatccgttggaccatgtcggtccaacgtgaccaatccgttggaccgcccctccatcagtttcatgccttcgagctacgtcgacggtgcggtagcgtggcccgaacccatggagaatgtatagttccacaaatattttaaaaatatgtatatatatatatatatatatatatatatatatatatatgtaaaattatgaacaataatgtatattttaaattttagttctggaaaatgcttcaactattgttaaaacatgcactcccacaaccacctgatggattacttcagcaattgttgatccacagtgtagtgggacatttaactatttaccacttttaagacgtggtatttaataatttgctactcataatctgtgacatgtggattcagtggaaaattattaaatgccacatttaagagtggcaaataattaaatatctcagtagtatttagttatcttactttcatagagactagaaaaggcgataagtttgcatatatgggtgttccagtttctaggtctcgtttttcatgtgcatgcttcctaatctattaaacggtacaatttttgtaaaaagttcttagggaagttcctttagaaaaaaaatcatatcaatccatttttaaagtttttagttgatacttaattaatcatgcactaatctaccgctccattttgcttgtttgaagggttagttcccaacatatactaacgaacacaatgagctacctgactttgaggaagttttgtatataatttggtataggtgtattgtgaccttctaagagcaagtttaataatagtatagtcaactactacctttaaaaattggcacatcatctataacaactttaatagcctacctatacaatagttttatataaatacatgatgcaccattattatttgacccacctctacacatataatattttagagtccaatctgtagcccatttttcttcgaatttgttttgaaaatatattattttaatgaaaaattaaaaaatagaagctgttcggctacaatctcaagtttaataccctgtcgaacaaccgcagttgggcaaggttgttggtccactaaaaaaaataaaaagtacatgaaagggcattggcagggggcctattgaactctgatgttcgataggtcctacatgcacacagtggcgtacagtggttgttctcttttttatttacttttttttatcccctgtcgatatataccctgttgaactttgcttgtttgatgggcgctaaacttgtaattttagtctgttaacctctattttgcaattctctattaaaaaggtattatttctaaaaaaaatctttttcttctctctcctctcctctatctttcacatgtgtttgtatctatagcatgctcttctacatggtctaataatcatttgaatcgtgcagatgacaataaaaaacaatcctcagttatgcccgaaatttatcaatcttgtcgacctgactctcggacaatggtgtctagattcagacttctacgtgttgattattttccttcagagctcaccaaaactggaaaagcttactctgaaactcgaaaaggtaaatgattttcttcaaatgtatgctgatcctatttattttaaaccatttcctcacgagtacgtcttttcgggatacaacttacaagttcttttttatctgatgcagtattatccgcatccatatgaacatatcattggtgatgagcttacagaaagatcgtttacatgtgagcatcttaagattgttgagatcatatgcatggaggatgatgaacccctggccaagatcgtggaaggcttgtttgttgacaatggcatgaactctgttcggtttgatatcaaatattggagtcagatcccgtttcagttacctgcattttaccgagaattgtacaactgaaatgtccaaggatctattcagttgttgcctcattaagcttctctttcttgagagggctggatttatatacattttgattccaggtgacttttggaaggacatgtagacatgtttacatgcgatttgcgaaaaagaaaaaaagaatagttgcttcatttgcttgtaagctggacggtcagctggtgttgtactcttgtactgttggatgatgttttgttcttccagagtggatatcttttttggctgcaaaaacataaattgtgggggtgggaatagtttgttttgatcttctggctgagttattttaaggcatatacacatgtttcctgctccttttggtgaaaatttttaaggcataaaacttctatgtttttaatgtgcataatttgggcaggtttaacactgggtaacaggatgaaaaatggtcatgtaggattatgaattctccatttttactcaactataggataacattgtataatatttactcttttataattataggctcatatttgcaaaatgtattgcaaacaaactggaaaaggtacagaggtaaaaaaaaaaaaggatgctgcattagctaagatttagtacattcaaaccgtacaattgaagaggaaattaaggccgacaactcatatagtttgtgctttgcggaccaaaaaaacaataactcaaaacatggaaactttgcatctgaatggctatgaactccattgtttcactcacagaattccgtcaatctcccagttatccttttcatcgtcacgagccctcctcgcggcctctgaatcagcatcgtcttctgggaacctaggctcctccatcatacgcctgcacaacattttcgacaaacacaggtcaggttaacaaaagacattccatgaccttgaagttttttcacattacaatgacgtattcagctatgcaaatgcagtctgaaagctgaagatcatcggatttgctcagcttgtgttccctaagggatagaattacacaaagcttggacaaacccaatcaacatgttatcattaaaaaaatcctaaggaagtaatgaaatgaaccaaagcaacaattctgcatcagtgctaccaccatttagatgtttttactcctgtttcagtgattcagtgctagcacaatctatcttgctaatttttcttttcctgcaaacaccgactctgaacagtctgaaactctgaactgaacaaccaaattatcaacagaaactcctaccatcaacagctgatgcaaactatgcaagcacagttttatctgcaggttatatcgatttcaagaattcacaattcacaaaaaggattacatcatttcatagacaatatcgatgcatcaaacaaagggggggaggtgaggtgttttcacctgcggcggttgcggcggccggcctcgcgggccttgcgcttgcgctcgtccttcttgctctcgtagcggcggcggcgcttgatctcctggagcacgccggccctcatcacctcccgccggaaccgccggaagatggactcctccccctcgttctcgtccaccacgatctgcacattgtaccccttggtcgccgcgaccgccgccgtcggcgagcgcgggggcgccacgtggaccaccgacggcggcggcggcgacctcctcccggagaacggggccaggggaagctgcagcagcgcgctcagcagtgacgtggtggctggagcggcagccatggccgtggccttcgattggtttagcttagcttcctcgctcgatttctgggaatggaaaaattggatgagaggctgaggaggaagaagcggaggagggatggatagtgaaggcaaaagagagaggattggcgacttatcctctctaatttataatttaggaaatttatttgtgaattttggaggggaatactttgaataaatttaatacatttttcttctctctttctttttcttttctataatccagaattacggttttcgtaaatgctgttttaacatttcaggttgtgatttttttttcttttttaacatttcaggttgtgattttttttctttctctcgatatatactaaagctttttgtcttcctttttacgatttttaagctatattattatattatattatattatatgtactgccaaatttctattaagaaaaacaaatttatgtgaaaggttcggaaccgtctccatgcttctcttttttaaaaaaagaaacagtgatgagagtaaattactatacattatttgcggcgggtaaatgctgcagtacggtgcttgtagaaacaccgagagaggcgagtcttgcggtcacaaaaaaatgccacaaaatgttatggaaagactttcacgacaaatctacaaaaacaaattactacctacgctttatgttataaatcacttaacttttttcataatcaacttattttaagtttgaccaaacttatagaaaaatatagcaacattttgaatacaaatcaaacatactaccaaaatatattaaatgttagttgtaaaaaaaaactaatttggtgttgtagatgattactaattttttttttataaatttcatcaaacttaaataaatttaattagaaaaaaaatcaaaacaacttttaatatgaataggtagtatcatgcatccaaccaaaataactttttataaaataaacgcccaaagtttagcaaatcacacataaatagcgtagccttattctacagacgaagcacgcaacaagaactgctttaatacgagattcagattcgatgccagatcttaacaaatactcatgtgtactactagcaatagcaagcaagcatgtgcaaccattcctttcatttcatacgagtactagcaagcattcatttcagattctgccctgtaaaccttctgcaagactgaagtggttacttgcagtttatcactgtgcaaccacctaaaccaaagcactgtaaaccgaaggtaaattacatttcatagttcaatgatgccttgtgcatttgcaagctggctacaccgacactcatgttcctttgtaaaccgctcagtcacacttgtgccactgtaaacctgaaagaaacacagatagctgtgtaaacttacattacacacctctcaattcttgaaggatacgagtacatacaaagaatactactagtagaaatatgatgaggaaaaaaaaactctattcaacctggggcatataacaaggttgatctccatgtagatgaaatgacaaagattataacactacacagtcacatagttttaaaaaatagtttattaggtttctacttaaaaaaatagtctagtttggtgactgttgtccttctaaatagtactccctccgtttcatattataagacacttcgattttttttcctagccaaacttctttaagtttgaccaagttcattaaaaaaattaggaacatctacaacaccaaactagtttcattaaatataaaaatcgaatatattttgatagtatgtttgttctgtgttagaaatattgctatatttttctataaacttagtcaaacttaaaaaagtttgattaggaaaaaagtcaaaacatcttatacggaagagtatctaacatcaagacactcaaaaatagtttatccatatggagcataacatatggatcaatgctgggagttcaaaagaagggatatagccaacaatacagcatacactatcgcaagtcgtgtagatctagagtttaaaactgtaaaagctgcctttgcaagtaactaatgttcttaaaacgatttgccagttgcaattacaatggtgccaatactataacaaacttagaacctaaatggagcacagttcaaacttggaccggtatgaaataaccatataatgttctgatgcatcaaataaatgacacatacagcaacagtactaccatttcttgagggctggtactgtcaaaacaatggaacacatgatgcatctacagcaaagatggagaatgaggaattcgaatggggaagtcgcctgatgcatcagcactcaccagtaggtaggtagataactagttatcaattaactagtagtagaacattcctcaatgttcttttgcatagcatccagcttctcaagtacatattccacctttttgcaacaaatctcattagcaatccttgcactgtagtcacacttctcaaatgggcgatattcgcaagcacttttgatttcctcacgcaatgtcgtttgaatttcctgctccagacataataacaaatgagtctgccatgtatgatttacaatgcacattgtgtcttaaatgtaaagttagtgaaagagaagagcaggaacatgtacagcaatacaattgtcatttcacacatttgacttgtattttggtgaagagtagaaagagcttggatggacccagagaaaggttcactggtatggtggcacccttaacaactaaggctcagttgtgattgttgcatggcactacacttttttgtttttgtttttgaagctgctgggaccaaaaatctgtgaaatgactattattctcctcttttttaaaaggctgtgaaatgtctgtaattctcctcctggtaaatcagatttaagttgattcctgttgaacgtattgccctgtcgagcatcacctcgtaaattcatgaaacaaaaggtaggaacgatgtgcctcgtaaatccacacctccgccctgccgccactccatcttccctgttccgatggtgctcccttacgttgatgcttgaatccctacgtctccacatcaccaccgtcatccaaggtttcaatccacttggatccgccgtcaccatcgcccacagcgacaaccttgctccccagatcccatcggcctcatcttggcttcaatatgggagggggatatctagtcggcaccagattgtgccacccaatcggtttcacatgttcgctctgttcacctatgttcttggatccaacgatctgttcaactttcgacttcttgcaggagacatctcatcgtggtgaatattgttgtgttggtcacttggttgctcagattcggtggaaggaaatatgtttctattttttggtggttcttgtaatttctgggtagatgttactgttctgagttcaattgctcatcaagctgtatttttttcaggaaaacatgctgatttttttatcaggaaagttgtgtaattttgatgatttaggtggctcttgtaacttctcggtagatgttgtgtaaattttattttctcggtaacaatagtaattggatgaattggaggcaagacttgatatttttttctctaaacaattcaccaagatctgtttttctgtacagaacaaattccagaatgatcatcacaaaaatcttgaaacaaagtcaggttcattctggtagttctaataattattccacacatacaaaaccttatgaaatgttcaatgtttgttgaggaaaaagtattcaattagctccttgttcatactgtaacctgattctagcatccataacatacccaaacaagggtttagaagggaaacaaattctggtgtaatacaagagttattttggggccccaataaattaccagtggaaacaatctgtaggtgcaaaagatcaccaaacatccaagcaggcaagatcaaaggtaagcatttcagatcttagggcgaggagattgagatgtaccttcatggcgagcatgaactcgcggcagtggccagcgacgccctcggtgcggggcccagtggcgttccccagctcctccatgaccgtcccggccagattcaccgcccggactatcatctgcacgcgcaaatccccccctcgccgcatcaagatcaagatccagtgaaaccccccacaagaagacggtccagggaacaaccaaagggaggggaaatctcgaggggagaaatggattgattacctgctcgacgtggttgagccgctgcagcgagctgctctggctctgcgggagcatcgccgccgccgtcgacgaggaggacgagggagtagggttttgggtttcgccggagttggaagcttcgagaggatggctaagctggtatatagggtccttcgatgtatatgggcctcgcgtttgtttcggcctgtttacctttctccttatccttggattactttcaggtttcagaccgtttgttattattaataagatttatgttcaaattattttgatatttttgaactttttaaaatatgattttaagatgaaatgctcaaaattttaatttttttatatggttttcaaagtgatttttaattttgcaagcatttggattaatatgatatgttacaaatttatttttttaaaatatagtttttaagtgatttttttattttacaaggatttggatgcgggtctcgagcttgtggcatggctaaaatgtttatttatacattctaaatgaaaagctacatggttaattttaaattttcaaaaaaaaaaagaaaaatgttctgttcattagtagtactctgcttggcggcttccttttgatcattttgctgtcaaattcctccggaattctcgtgaaattagtcaaattactttccaaaaaaccgtcctaattaatgtaatcctgaacgatacgacgaagagcaaatggaatggaaagcttccaatgcagtctccatcagtagttggcctgaacccggtaaattaagcttgcttcacctctcttccccggccggtctccggtagctcgccgacctctccaaaagcgactcatggcgagccaagaaaacctgcacgccaccagcgagctcgctcaacgatcgatccgatgcgttcgccgcgtgatcttgtggtggcggtcgccctcttgcagctgtccgtcctcctcctcctcctctccggcgagccggcggcggcggccggcaagagcaaggtcgcggcgatcatcgtgttcggcgactccacggtcgacacgggcaacaacaactacctctccacgctcgtcaggagcgacttcgctccctacggccgcgacctccagctcgccggcgccggcgtcagcggaggcggaaatggccggcccaccggcaggttctccaatggccgcctcgccgtcgacttcatctccgaggcgttcgggctgccgccgctcgtcccggcctacctcgacccggccgtcaacatgagcagcctcggcgccggcgcctgcttcgcctccgccggcgccggctacgacaatgccacctccgatcttttcgtaagcctaaaaggattgctagcttagctccactttcatggtgttcttggctgatatccatggtgcagtcggtgctgccgctgtggaaggagctggactacttcaaggagtacgcggcgaggctccggagcttccggggagacgacgacgcggcggcggcggcggcggcggcgacgctgtcggaggcgctgtacatcgtcagcatgggcaccaacgacttcctcgagaactactacgccgtggcgcgcggccacgcggcggagtactcgacggcggcggcgtacggcgactacctcctcggcgtcgccgaggcgttcgtccgcgagctgcacgcgctcggcgcacgcaaggtcgacctcaacggcctcccgcccatgggctgcctcccgctggagcgcgccaccggcggcgcgtgcaccgaggagtacaacgccgtcgccgggcgcttcaacgccggcctccaggacatgatcgcgcggctcaacggcgagctcggcggcggcgcgaggatcgtgtacggcgacgtgtacggggcggtggccgcggtgctcgccgacccggcggcgtacggggtggagaacgtgaaggccgggtgctgcggcgtgacgggggtgttcgagatggggtacatgtgcggcgccggcgcgcggagcccgctgacgtgcaccgacgcgagcaagttcgcgttctgggacgccatccaccccacggaacgcctccaccgcgccatcgccgacgccaagatgaacaccaccctccacgtcttcctatgaacgcaaccatgtgtttataggagatgtacttgatagttcagtgataaggggtgtgatttcaaccctaaagtctcatgttcaatttttaatatgttcatgatttcttcttaaaaaaatatttagagggatgtctctcccttcaaatcttgtttgtttttagcgcacaagcaagattctgcgtgctgtgaactactattcaacaagtatacccattgaacacgatgatgacaatgatcaaatagtagacatattaatgcaatatgctaaacatttttagttaagtttgtttttttaattggatcttacatatttgaacaatgatatttcatattaatttatgctgctattttttttatttttttaccactatttaggtggccaaaatgcccatctccttaacatcaaaaacccaaaaatgtgattctttcgttggaagaaaatagaacaatttagaatgcacgaaaaggtcctactattacacattactttttatctctctctaagtcattcaaaaaatcagtttttttttaattaattagctgtaagtgtgtaaatcaaccataacaagcctgtccagtaaagctacgctcacattacgctggaattcatattgcactgtagaagagttgatacagtgtctcccactgaacggcgaccacagctcacctcgcgcctgatctatttatttccacaacaaacacgcacgtactcactctcagtgtcactcacttcactgcttacaccgcgcgacgcgtcacacacgtacgtagtagctagctgcaatggcgtcgccgctggtacggctgctcctcctcctcctcctcgtcgtcgcggcggcgagccgcggcgcggcgtcggcggcgaaggcgaaggcggcgcgggtgacggcggtgatcgtgttcggggactcgacggtggacacggggaacaacaaccagatcgggacgccgctgcggagcgacttcccgccgtacgggcgcgacatgcccggcggcgcgcgcgcgacggggaggttcggcaacggccgcctcgcgccggacttcatgtcggagtccctcggcctgccgccgctcgtcccggcgtacctcgacccggcctacggcatcgccgacttcgcccgcggcgtctgcttcgcctccgccggcaccggcctcgacaacgccaccgccggcgtcctggtaataattaaagcaaagctacaccaccatcatcactatcaacaatcctcagcaaaatacttgcaaaattcacacgcccatcaaattctatatgaaattcttctaaagaatcaaatgcgtgctgaccttcctccgtccgtttcatatattgcaagtcattttgacttttttaaattaagtcaaacttctttaaagtttgatcaattttatagaaaaattgacaatatttatagcattaaactagttttattaaatttaagattggatatatttgatagtttaaatgttaaaagtattactatatttttcaataaatttgaccaaagctaaagaagatgattgggttagataaaaatcaaaacgacaaacggaggtagcaatacacactgtgcattgcaactcgcaagtatttctaagaatcaaatagtagtacaacattatgcactgcttcaaagaaccaaatacaacattatgcatgcaagttgtgaaaatcctttccaaagaatcaaatgcaacagcattgtgaattgcaagttatggcttttccaaagaatcaatcgcagcattatcattgcaacttgcaatctaagaaaaattcagacttgccgtttctgaataattgtactttgctggagtcgtctgaaaatgtctgcaatttaaggcagttcgttcgacgttaggtctcgttgttaaaacttaaatgcattgggacccaaatctctctttcccgggcactgttgcatgcacaccactgtcatcacctgtaacaatgaaaaagaaaaatggctgtacgttttcagtattcagttatctttcgatggcttgtctgaagaacgcacataatgggcatgtgtttccctgctttgttcttcgtttttctgcaaccacttgtgccggcattaagtaggctagctggattcatccgattgcgtcttctagagaagaactgtcttgatttgattgcctaatcatggtagggcatgtatgcagttctgaatttattattaaatcatcattaatccaagtaggaatatttctctgagattgtctcctgctgtgtagagctgctcactggagtagtacatttctagatggtttccgacaagtatactatatagggttacagcactaatctcagtgttgattgatgttgtctcaaaataaacaagatcttactgttgttggatcaatactcttactgttttacaacactctagttgtgttgattgattcaatgactcctacatataaagttaaaatatagtaatagtaattaactaggtgaaaactatattaccaatgactgattcttgcaataaaaccagtacttaagttttgacccagagaatccagcagcattgcttttgtttcggttgtcccggtcccaaccaaaatcgtatgctactactaattacaacgagaagtactcctgcatccatgcagatgcatgtgacgcattcacactctcttctccaaatctcacctgctccaaatctcatctgccaaatgcatgttcataatcagagctcacctcgatcgatcgaattcatggcgatcgatctacacaaaagtgcgaaattaattgacgcgcgcgtgttccgattagtcagtgatcccgctgtggaaggaggtggagtactaccgggagtaccagcggcggctgcgcgcgcacgcgggcgccgcggcggcgcgcgacgtcgtgcgcggcgcgctccacgtcgtgagcatcggcaccaacgacttcctggagaactactacatgctcgccacggggcggttcgcgcggtacagcgtgggggagtacgaggactacctcgtcgccgcggcgcgcgcgttcctcgccgcgatccaccgcctcggcgcgcggcgcgtcacgttcgcggggctctcgccgatggggtgcctgccgctggagcgcaccgccggcgcgctcctcggcggcggcggcggcggctgcgtcgaggagtacaaccgggtggcgcgcgagtacaacggcaaggtggaggccatggtgaggtcgctccgcgccgagctcccgcgactcaaggtcgccttcatccccgtctatgacaacatgctcgacctcatcacccacccggaaaagtacggtgagtcacctcctttattataagtcagtttcaaagtcaaaatagtactccatccatccacaaaaattagacatatttcacatttgagtttttcctatttgtaaactttatgcattcaatacttaaatgaagagataaattaaatgtttgattataacccaatgagtcatctaaacactcattggttgcatgtttgcattcattccttaattttgtaatatccaagataatttaatttctctttggtcttagtgacaaaagtaatatgcgaggaagtaacatttttaactcaagataaatttattatgaaaatatattcaattattgatttaataaaagtaatttgatattgtaaatattattatatttgtctatgaatttagtaaaaattgaagcagtttgactttaacaaaagtcaaaatgacttacaataagaaacagagggagtagtaaattgtatttcgcattggataaagcatatattgtttcatttgctttacaccagtagtagattgtatcgaaataaattttagttagcacaccacgatacgagaaaaattatggtatttgaaaaactacctcgaggtatctagattttactctgaaaattttaactagtactagctaaatgtaccaaattttacattagaaaatatgatatctactgttaattacgagaggaaggcacattctattctcataagaacacgaaaaattatagtgagttttgcttaggtggctcggccactgacccaagtatgttgtaatgttttggggaggtagggctggagaacgtggaggaggggtgctgcgcgacggggaggttcgagatggggttcatgtgcaacgacgagtcgccattgacgtgcgacgacgccagcaagtacctcttctgggacgccttccaccccacggagaaggtgaaccggatcatggcgcagcacacgctcgacgtctgctaccagcaaggcgtcctctgatccatccatcagattatctgtaatgcgtaggatttgtactggattcttgacgagagaaaaaaatcgataaatatatggcggcacatcatcatggtcagaaacccctagatctcaaatcaatgggaagaatcaaatttgtattgcattttttaccgcattaagttatggtttggtttctgggacccacatgctgacaaacacagtcaagtttccatgtcagtagaaaccgcttcccaaaccatcgaaggagtagatttgcactggttttaaaagttgtgaagacgttatacccggttttgtggttaaggaaggtgattcgagagcaagagattagagtaaattacacccacggtacaacaacttggcaggtgggtgcgatatagtacaagaacttgagaattgaacatccgagtgcaacaacttaataagtgagtgcgttctaatataagaacttaataatttagtattttggtgtatcaacttggctaagcatgtgcaaggtgagttttttttcacgatgtcaatatgccattacatagtaatcatacggatattaccttataatattgaatttaatctttaagaattatactacacatagtagtacaatttacatccaattacctttaagatttttttttggttttcttccccttctaaaatatcaaccaaaaacaataatttctacatctagtttaattggatttcagttattagttattaggataaaaaataaatatacttatacaaatctgtgctagtatattgtcaaaattagtacttaaaaattgaatttatataaaaaatgctccaaataattaagttgtcacctaaccttttaacttattgtatcaaaatcgtacctaccttgcaagttattgcatttatacgatcacttataaagttctcatactaaattgcatatacctgtcaaagttgttgcactagagcacttattttttaagttattgtactaaattgcacccatctaccaagttgatggaccgtggatgtaataagggagtcaaaatagaattattccatcggtcaagaccacgaggtaaccatgggcttagattcagggtctggtgattttctcagaatttgaagaggcccatgggccaaaatgtggccgtacaggagaacaatctttcgagtctctgcaacagaaaacaattcgatgctggtgataaaagttcacaaaattgcataagaagtttggtcagattcaccgtttcactttcaaaatgatctggtttgagcgagaggataagattgcaaaggggaccacacgcaaaattttccggatgtctaaaatcaaaatttacaatttccgcacaagaataggcaggtaagttacatgtgccaatctcatcatattgtgatttgatttgtgccaggggactgtaataaagaacaagaacgaacaaattaattaattacacagtacatttcctgtcggaaatacgtatacgattgggagttttacagtaattaattaaggtcggattaataatacaaatccagcttctgcatcactccctcacccttgggaacatgcacctgtacacctgcaattcacaaagcatgcaattttttttaaaaaaaaatgaactcgaagaagcaaatgaattacagaattaaataattaattaactaaagttgcaaatgaattattaaattagataataatcaatcaactaactaaagttacgtgcctttgataagaaggacctcttctcggcttttctccgaggatgccgcgccggcgccgcctgcgccggcgacatgcgcggcgtgacgtccggcccggcggcggcggcggccttcgcaacctcccggtgccgcttcaccttctcgaactgcaccgtgaagccctgccccgccgccgccgcgttctgctcgtcccacacgccgaacttgggcacggccgatgccgccttcgcggcgcggctcacctgcggcagcgcgtggcgcggcggcgacgcggccaccctcggctgcgcggcgtgctgctgctgctggtggtggtgatgcatctgcggcggcgccgcgtacgcgccggcgccggggccgccgtacccgtagccgccgccgccgccaccgctgttgctgttgctgctgtaccgcggctggtacggcttgggcggcgagaacttgctgccgcggctgctggcctcggacgccgcgctgctgccgttgctgccgctcctccggtggtagccattgccgctacgctgcgacgccgggtagtggtggtgatgctgctgctgctgcggcggcggcggcgcccggtggtggtggtggtggtgcgccggcggcggcgcgtggccgtgcccgtggccgtgcgagctcggcgggcgcgacgccgctttcctgctcaggttctcgtagtgctcgtagggatcgaactcgtagtcgtcgtcgtgcgtcgccggcgccgccgtcgccggcgtgggcgcggtcttgttctcgcgcaccttgtcgaagaagacggtgtagccgatgttctcggcgtcccacgatccgaatttgggcaccacggggccttgtccctgcacgaatctcgagatgagattaaccatgccatataacaacgtaatttaatttcaccatgagaatttttttttactctaactttgtttacaaaatccaaagaaactaactcggtccgttttataatagctggcactagacaatattcattttggaacttttaaaaaatattacatacactaaaaaattggtgtcatgttactaaagtgaggtatgtcctatatgtgaacataaatatgtgtactctggtttaccaatttaagggtaagtaatagtcaaagtataaatgagaaagcaaaagaaaatgatcagttattaaaaaaaacgaagggagcataacttccgacctctcctaattaagaagaatcaccatataaatgtacgaatacgcgtctcatatgctaagtcaggtgaaaaaaaagggagaataaacacgaaaagccaactactagtccaacatccagccaactccaatctgtacaaatgaccctattatgtcgttgtcatttccagcatgagtctccttgacgtctactaatcgtctaaaccaagcaaaggccagccaaatttctttttcctctctctttgccatgaagatcttagcacggatcatgctgtcatagattcatagtgtcacgcatgcatgtgcagtgcagccggctcagagcatcgcatgttcagatccgtcagtccaactctgcctaacccatccatctgtccatccataatccattgccgtgactgttgtgcagttatgcatgttaccaacttgcatcttgcacatgggggtggtagtagtagcctcgcccaactcatgagcctaatttgatagtaattggcttgaacacaacgacactaatcgagtaatttgagaaacactcatagattttccggctagctccacaaggtggtggactagacgatctgggttcgaagcctaaccccttctaattatttgatattagatcatttcctaatatttgctttttttaatcgagtaatttaaagaaaaatgatggtgatggtgatattatgtgcagcaatcatgggcacaccgtaattggagcagagaaagaagaacatctcacatgatcaagcaagaatggattgggagtaccattttcatgtttggaagcaattgaacgattctagatgcagagacaagcatatgcaaatgcaatcaacaaacaagaagatgaagatgtaaaattaatcagttaattgtactcacagccatgaagtactatgctgcctgctgaagaagaagaagaaccgatcaggtgaagatgaaggcctctccttcttgggctgattgctcttctcctctttctctctccctttcctctttctcaagaggaaaggagagaagagaagagagagaaagcagaagcaggcaggaatgatggcaggacaggacagagaaaccagggatggttttatgattggggttcagaactgacagcctccctaaattcctaattaaaggagatcacccagctgtgtgactctgtgcaagcaaaactcaacagggtggcagctggaagagagaatgtgctgcccttgccctgcctgccagtgtatgtaccactgcctttatggagatagagaggtgtaacaataacagagttgcaggtgaaggaaactggaaaggcaaaagagagaagaagaacagctcaagcctttaaccttctacctacctacccaaggacatggtggttgtttgtttcttgagttggcttctgcttttgcaaccctcctctctctctctctctcttctcacctggtccttgcagcatatgaacatgcaaagtgcagtattttaggcttttggtaatgcaatcatgttcataaggagttgtatctttggcaagttgcaaggtatgaacagcacctggttttgtcctagggcaacaggtttgttttactggactgaacttgagctactcatgcatagcatatctttctttttgttcctgtgtgctgtatgcaatgtcaagatctctgtcagatagggttgtttgttcagactgaacaaacctttttctaccccaattgggagtatttctcagccattggatgaaaaagaagagtgaacgtgccttgttcaaagatatcaaaatgagggcgagaattcaagagttcagattttctcaagtcaggatccaatgatctttgttgattgtttttacacaaactgtgcgtattcttcttctgctgtgcatttcagatgaccacatccgccaaaaaggaaaaaagagcaaacacatatcgtgcaattttgcatggtctctcatacttcgagtatactcattcttcatccagatttgtagccagaaattgtttttttatggacaaaaggagtacatctttcagcaatgctctcatgttgttggtgccatacgaaagccagcagcaattcgtacccgttccggcacgaattgggagcatgtttctcagccattggatgaaaacgaagagtaaactgaaccgagcctttgctcaaaataacaaaactagggcaagaaattcaagatctcagagcctcacaagtcttgatccagtgatctttttctattgttttcacacaaacttcacgtattcttctgctgtacatttcagataatcacatgttcacattcaccaaaaagagaaaaaagagcaaatacatatcgtgcaatcttgcacggtctgtcgtacttcgagtacacatctttcagcaatgctctcatgttgttggtgccatatgaaagcaagcagcaatttgtacccattccggcacatcaaaagcactggcagtacaggccacattagctggctcacacatttcatcaaatagctgatgcatttaagatatcaacacaaaccggaaagcgaccaaattgcaagagaaatttaagagaagcaagccgacgcaccgcctgtggcttgatgatgatgcaaaagaaagaaaaaaaaaatcttgaaatggcgacctcaatagggagtggacattccatcgttatttgcatgtcatccaaatggttatgaatttttttttaaaacaaaatcaactagatatattaatatgtgatagatcactccacaagcatagaagttaaaattcaacttctacaagttgcaacaaaaaaacaaattaaactattgctatttaatgtatatccaccgttaaatttgttttttttttgcaacttgtagaatttaaatttgaccttgcatgtttctgaagtgatttatcacacattaatttattttgttgatttttttaaatttttttataaccatttagatgacatacaaataacgagagtacaaataacaagaggatgtcctctcgagaatttaaaatagtttcctgatcccaataactgaaagaagcttcattacgagcgcccatgatcgattattatagccgtcgccgtcgttgtcgccggaattgcacaccaccggcgcgacatcaggcacatgggaagctttgctcctgcgtgctggtgagcaggcagtgacgcgcaagatctggagcagcagctgaaacaaaggagcagagagcagtagtcagtttaatccagtgtgtaaaaaagaagagaagaaactaatcagatcatcatcaataaactaatggcaacaatgtcggagcaggtgctaagataaaatgttagtataatagtgatagccattagcgcagctaactctgcacaacagcacaagcgtccagattatcatggaaaaaacctggaattgtgcacgcaagatttgcggcacctttggtggctagcttcatggttttctttagctttctagcagcaaatagcatcgtgaggtatatatatgttcagcaatatcaaggttagctccagaaactaacaagatgatattaaaaagaaagtagtactggacaggagaaagtatggaggaaaacaaactgcagcattcattcagatacacgcatttaaaggaatgaacagaggtcaccaatcaccatatccatttttatttaaataagttgcaacaaaacaaagaaggtacaacagaaaatggtactaatcactagtgttataaataatgccataagacaatcacacagggaaatagccaaataggtcattaccatacttgttaccccataatctgctcatgttgcattttactactggataaacaagtgggtagtcagtggccgggtctgttggaactagtgccaccaataatacctaaaatgataaagaaaccaggggcatgtgaaaccaacaatcattgaatgccccaatagatttagattgtgaaaaggagaaaagcagatctcaacaagagaaataagagaaggcatgcaaaactgatgcactaatatcactgtaactccgtatggatcccagagtcaccaagcaaaatcaaaccagtcagggttagaaatgaaatcagcaaatgcagtgatgaatttactccatgatgagcatagctgggaatattatggcagaaaatagtcatcgagctatttctttaatcagtcatgctgcaataagaggccaaagaaaatgtgactaacaattcatacaatgggaggcaatcaagtatatttagcattttagccagacaaatataaataggggcccaacatgtcaaacaacttaagtcataactcataaccgtaaggtatattacatctttgcaccagtccttagtacagggggtgttttcttctgtttcgcctcaccttgtccttgcccatgattgcaccatttggctcatggagtagattagagtccactccaacttgactatattcatactcatgctatcactgaagcacacctggatagatcaattctctctggaggcatcatcaaatcaataaaataagacataatgaacttgagcacgaaaagacaaaaacagaaacccaaagccatcatcaatcaagacaagcaatggatgccatacagtaacaagacagttaacttgagaaagaagaatagcacaaatgtacattttgtttttacatattgcctaccacacatgctaaattacaccttttctcaagataaattacatccaaagatccagattttagaagtgattctaatcaggtaagtgctttttaacaaaccagtttccattttatcctcacagctatcagctatgcttcttcccagagagaggttttccaaaagtgaatctgcaagctaggaaatcaatcgtcatgatatatttcccagtccacatgacttggtacaaggaacctgaatctgtctataattaatagttattacttcttgctatcagtatcactgtccaatagtatgtgaggaaataaacactaccatgctcaataatgcccttaaatctaattgtcatgacatatttctcagtcctcaactcatcatgacttggtacagggaacttaaatatgtctatgaagaatagttattacttcttgttatcagtatctgtccaatagtatgcgaggaaataaacactacaatgctcaataatgcccttaaatctaattgtcatgacatatttcccagccctcaactcctcatgacttggtacagggaacttaaatctatctatgaagagtagttattacttcttgttatcagtatcactgtccaatagtatgtgaggaaataaacactaccatgctcaataatgcccttaaatctaaccaggcagctggggcaatggagtaccgaagactattggacatgcaagcacaaatatgcaaagcagaacagaaaagttaagaaaacaaatggtccagcaaatactatcccaaaaacatgtttttagtgaattgcactttactcaacccagagttcggaagaatcgtcaccagttcagagtaatgtgtaagtgtttagaaagaagcactcacaaacagatcacatgcatcagttggttccaatatctgctgtacaggcccaaatcattctcattcccattggacttctaccactttgttggcaacaatgtttctggttttatccaatagtagatcagcaggattattagttcacggtatgtcaggcaaaacatgaagaaaggataaaagaagtgcatgactgcatgctagttttaccactgggaccccaaaaatataaaaatgttttccatgttaatagctactatataataagatgcgttcacatgatatctggactactttttcctaccataggttctcactggtgatgtttaaagatcagatggacatttcctattgaagaagaaatgtaatcatgtagataactgcataataattgaccaaagttaatagcaacatagaaaattttgataacctgaagctacaagtagaaagtatatcgcgtgttaaagattaacttacattattaggtaaaaaaaccagagtgcatcatgctcagattctgattaggcgaatagcatgataatttgcaaagtcaattatggaaaacatgtctacattttcatatatgctacaatggtatttcccagaccatgttttctagatgacactaaatatccaaatttcgcataaattgaaacagtgggagcattaagagaaaggagccagcacatttttgttgcatcccaacataaatgatgaaatcagaataaaatgttatcaatgcacacaaaagaaaggataatgcaaacggacatgaattgatgatattcaagataaaatcatgacttgcgttaaaaaaacaaagtgagttaggtgcataggcatattatacccttatatttgtaatggaacttaattatttataagaaactatcacccctgatataaacaaagtatcatgcaactaacaaaacttattactaacttcatttatgtaagaatatttccttgtcgtttgctttggtcaatgcctcctcccataaatgtaacaagagaaccctaataagattgccaatgttgcgcagaagaacaggtatgaggtttagtgggaaagcctgcaaatcagtgtaggcataagatttgacaaaacacaaaaacaaatgttagctatatcatacagaaaagattatttgcaaaacaatgatatattagaaaaatacatgttccgcatattaggccacaacacattatgttactagcataacttttccacctgcaagaattaatcccgttatcatcttgacgccaatgtcatatggtgctacagggcagttaacctgagtttacaccacatagaatcatccacttttatgggtgtgttcggctggtatttttcagctgcggctgcagctgcagtagttaaggattgctgcagcttgcagcaaatttctgatgtagcagccgcagcagctgcagcttatatggctgcccaacagagcctattatggcttgatgcccaatgaatcagctaatcagatgccaaattatccatgctaatggttttcagctaaattccaaaggctgctacattatttcatgctgaaggtctttatgtattacccactaaataatagcttctaaacttggttcatatgaatttcttttgatcacacaaacatggaattatatggaacatccaaagcgatcttatgctataacacaaatttaaagcaaatgtgaaactagatgtaggaacaacaggtgtggatcgacataataacatgttaacaacacaagcatcaaggaagcaagacgatcttatgcagatctagatcattgctttaacagaacgaatttcagctgtatatttctggcatttaagcttcctgtttgctacaagccttctgactattctagtaaataggtgggatgtttcaagcttcccaattccaaaaagaaagaaaaactaaaagagtataaagggtaagaacaagatgagcacatgtagctaaagattgaaaataagttactttagctgtctgcttcctcacaggaaggaagcaagtaaaatgttgctatattacaacagcacaaccacagcgagctgctgcgagacgcagcaatcatcatctatcgccagcagcaagcaggcagatacgcagatcgggccacattaatcatcatcagatcaagtaaacaagaacaacacaaagcgcggaaggatcatgtcggctacgagagaagggaagaaccaaatatttttctccttttcctctttctccaacgaccggtggggttgggggctcagagccgcagcgccgtcagcctcagctcctcgtcgtcgtaggcacagccaaagccgccgccgccgccgccgcctccaccaggaggcaggttgaggtcgaactggaacgggagccggcacgagggcgaggcggcggcgtccgcgcagtcgtcgtccaccaccgacgccgacgacccgcagtcgctgcggcagtcaccgtcggggatcggcggcggcgggggcggccgcggcgggagcaccggccgcggccgggtgccgaacgactcgacggtggagctgaggctgctagtggccggcctagcggcgacaacagcggcggcggggtaggtgaggtggtggtggtggtggtggtggagctggggttgggcgtgggggagggagagggggaagttggtcttggccttggccccgcgcagcgcccgcgccgccgcgtcgtaggcgcgcgcggcgtcctcggcggagtcgtaggtccccagccacacccgcgccttcttcgccgggtcgcggatctccgccgcgtacctcccccacggccgcttccgcaccccgcggaacctcgccgcctccgcgtcctcctccgccgcgccgccgcgacgcatgcccgcgccaagctcgggaatcgaggagatgggaatcggaatcgaggcggtggggattgggaatgggaattgtgaggggggggaggagaggagagggggaaggtgggggtggggggaggagttaattgggaaggtttgcttgtttgtgctgccaccgcccacgacgctgcccactcgccaccaccgccaccgtccctggccgcgtgcctccttttttttctcttttctcaaccctctctcctctctttttctttctcgcaggcctctttaattcttttcttttgttgttgtttaaaagaaaaattaattgctttttgggtttctcttttgtttttcttttgtctaaggttctgttgttgtttaaaagaaaatttaattgctttttgggggtcttttcttttgtttttcttttgtgtaaggttaggttttctatggactaccgcgagatgttttgatattccatgtgattattattgcatgtttatgtatttatatttttttataaagatatggaaacaagatctttcgcaatagtagcttgctgatacgacaaagggtcatgctaaccagcggtaacacattatctccataatttatgtgtaaatcaattgaccaaatgcatccctcactactacaaagcatcaagtaggtcttggaagtgctgaaaccgacacctatagatcttttcccactttcgtgggttgaaatcgcaataaaacgacgcctttaaacaattatcggtgccggcactaaataaaaaccgacacctattctataggtgcctttttaaaaaaaaagtacctttaatatattataggtatcggttcattaaaaaccgacacctataatataggtgtcatcgagccgagccagtaattagatgagccgaccggcgggccccaccatgacgaggcgacaaggagataagtttcaatctcctctctctcgtctcctccctctctctcgctctcctctctgtctccttcccttctctctctccctcccttctctcccgcggacggtggctagccggcggaggcggcagcagcggccggcgccctcccctccgctagatccggcgggagggtcggcggcggccggggaggggggtcggcggcgaccgggacgacgtcagcggtggtctcccgtcggcggcggcggactccccacaagcagcgacggattttgtttatgattatgattgcggtggatttttgtttgttgatgatttttgtttgtgatgaacaagaaccgatgttttttttagatttttcgatttcttttttggtttgcaggcatcggctcgaattgagcggagccgagccgtactctttttttgtgatccatacacctcaaatgtgccgattcttgaagccgacacctttgagagaactcaaaagtcccacctgcgatgtgtcggttgccaaatccggcacttatgtgtggttggcaactggcaccagaaaggcatttctctagtagtgcctatagcatttctcatatagtgtaagacatagtaaaaggtatagaaaaataaggcgttgttagttaaaatacccgcgcaatgttgacggaatcaaaagactatagtagacaactatagtaaacttaggtggtatttatttctactaaatatgaagataaagttaagtgcggaaaaagccactagtgcatgattaattgaattttaatcattacaaacacgaaaaatagatttatctaatattttaaagcaatttttatatagaaagtttcatatgaaatatagtgagctatggggtccacatgttagccctctgaaaagctagtaagttttagaagatctatttatgttctattaacatggtatgtatgttggtgttgtgaaaatgacaagtaaagggcaaaaattccggtaaagaaaatcaataaagcttaaaagcacgtgtaattaagacactaaagaccttaggacgtcgcctctaaattttgtaacattgtgtaatgttatgagtatggaaaaacaaaacagcaactcattcatgtatctgcatggaataactgagaattcgtgtgtgatctatccatgtttttgtttgttttttaacaaactttaaatgcggtatgttggatctggacttttccttaccaagcttataataagaaatccaccaaaccggacttttctccttagtcacactcacacatgccactgtcgcgggaaataacaaattaagagcagtaaagaaggataaccacgttgaatctatacacagtcaaaatacgcagttaattggatattcaagttggcatagtatggtataatattgaaagtataataaatttaaagataacatttcacacataggtataatactactgaaagtatgtatccaattttttatatattttttgtgatatttactagttggtttgtataaagtgtacattgaaaaatttgtgtgtatataatacgttcccgctttaactacctctactaatctcatatagttttgtgaaaattaacaacccccttccccccacccccaccccccaacaacgttttagtgctttactcctgtcccctctttactactttaccccccattgtcttgtttagcctgcctcttttgctttcatctattttttgcttgctccattgctcggtttttaccccataatcatgcccaccgcctttccatccatcgttaaaaaaagtttggtttcaaacaaaataaaaaaaacgaatgaaaaaaaagagaaaagcactagtgcatctacgggcctgttcactttgatgtcatttttaaccttatgaaattttagtaaagttgctaaaaaatggctatatttagtttgctaccaaattttggtaactatataagaaatcctgccaaaattttagaatttggtaagatttttttggcacgaaagtgaacatgccctgtatctctgacctgagagagatgtgagttgggttgggttgggttagaccgaccgggcggccaaccaccaccagccgatgcgacgaccagcaggcagcagcaagcagccagccaaccccaccaaccgatcagccgtggatcggagggaataaaagcccccgagctcatacgtgatccgcctcgtcgacgaacgacgacacatgcgtgtggatcgattcatcgatcgatcggtggatggacagatgcatggaaaacccatgctgcttgtggtggcgctttgctaattcggtttgtttgttgggctcggcgtgcagcgacgaccgcgcgggcgggccgagcgaagcggtgaatgtggcgggcgcggatggcagatgatacgggggcccggcgggcggcgggcggcgggcgatcccatcgtgtgtccgtctccgagcatgttactctattccactacggagcacgggggcgggggcgcgggggttacaccaaaatccatggctcatgatgccgatcggtgatgtgatgcgcggtgtcgtcgcgcgtgttattaggactccctccgccctaatataacacaattgggatcctcttcactgacatgtgggtccaaaggactgtggagcccagtgaacagcaaacttaataccgatgtgaaatactccctccgaaaaaaaaggctaaccctagtttccgtgtccaacatttgatcgtccgttttatttaaaaaaattatgaaaaaaaattaaaagataagtcacgcataaagtattaatcatgttttatcgtctaacaataatgaaaatactaattataaaaaaaatttatataagacggacattcaaacgttgcacacggaaacccatggtttgtctttttttttgacggagggagtattctatatttacgaatctgaacagctagaaccataacaacaatgatgtttctaggataaagtctttattaaattgagtgtttatcaatagatttttttgaattttctaaaaaatttaaactacgaagaaaacctcgaaattaactctaaaatttatattttatccgtaacaacaaccagagtatctcgccttctgacaggtgacaacacgagacttgagtcttgggaactctgcgcccagttaattattatctttatattctaaaatataagcatgtctatgcttttttttcaaaagtttagaaaacatgaaaatatatatgcttacagttataggagtattttgaaacggaattagtatttgccaccttaaacattgaaattctcaccatgcatttgttttgggttgggaacacttctcctagcatgaaaaaaatgaacaacagattaacatatgattaattaaataaaagatatatttttttaaaaaaaattatatgactttatgaaaacaacttttataaagaaaacacaccgtttaactgttgagaataaacataccatttaaccgaaaactaaaaattaggataacttagttgagaacacaccctctcaatttcatgtgacgcacaacgtttcattaatcagtatggcgattgtatgtcactaggctgatgaaaagacgtgtagcttgagcgtacaagagaaggtcgatagcgagacacaatggtggaggggagagagcgtgaacgtctctcctccttttgcagaagaaacaccggggcggcgttgagtgatcagttggtgaatggctctcctcttttcaagctctcctaatgatcattcacctgggccgtgccagacaaaagccataacaaactttacgtgtacactacagactcgttgagagcaaaccaaagatggcgtcgccatcgttggatcaaaactgtatggacagaggatatgttgttaatgagaacttgaacttgttacttgccatgctggctaaatagcagaatatttcacttactttctgtttgagaaatacgatacaaacacaagcgcgtttaacctcattatcgacaggtgaatcgtaaatacgaccataagtgtcagatataggactagattcgggtgggttggttctaccggaaaaccaacccattgagctacgttagcttcgctattttaattaggaatgatatttaaccattcatcttattttaaaaaattacataactaatatttgttttattgcgagttgttttatcattaaaagtacttcaagaatgatttatatcttatacatttatgtgaaatttttaaataaaacgaataatcaaatatatgtccaaaagtcaacgatattatttattaataaatagaagacttgtattttagtagtatatatgctagttgcgaatatcaggagtactattcgagtgttcgagcaagcttactttcagccattgtacctaactagtagtagatactgcaacaaattttgagatgtattttttctctaagcatatgggagtacccttttccggaaggaaaaagaaaacagctaagagaagaagaagaagaaaaaaaagaaataagtacaccggaggtccctcaacttaacagcgagattttttaaggtcccttaactataaaaccagaaatatttacccctaaactcatataaaccgtgcacacaaggttctatagcagtatatatgggtagtttcgctgacgtggtatcctagtcagaaaaaataattacgtgaggcccacatatcagctgcatatcttttttttcttttcctctcttcttttctcttctctcttctccaggccggcagcgggcgaagcggcgatgggggagcctggcagcggagcagcggctggctgctggcggagcggacggcgggtgagcgcggcggacggcgtaggcgacctcggagacgttcgtgcacaccttgttgtgtcggtccttgctcctggacgcggaccacacgatgcggccttaccccgaatgcagtggccagtgcgccgacgggcgtcgactcgctgctgctaccaccaccatgggcaactggttcttgtcttcctccaccttgagctccctctcacccacaattaaccggaaaggagaagagcaaacataaaaacaagaagctaaattctattcctgcatggggtttgccaagctcagctcgccatcctgatgagaggaaaaaaagatacagtggccataggaaccccacagttgcatgggcagagcaagcacgcgcacatagaatcgcagcctgcatggccttcctcctctcaggcgtctcgcggctgccggtgagaacacggttaggttggagagaggatctggtagttgatgcccttgctgttgtgcggaggtggatgcggctgaggagctcctctgtcctcgagagcggcggtggctgagggggcgggccactgtgcgcggatccagccgtcccctccctcgggcgctgccggagttgggcggcacgggcgccagcaacagcaatagtcggcctcctcacccacccattccgaccgacggcattcaggaagaaaatagaaggaaacggggcgccaacagccgcagcccgcctgccgcgctcgctcgccctccactgctctgcccgccgtcgcgctcgcccgccggctctccgccagcgcaggcctcaataagagaagagataagagagaaaagaaaagacaagaaaaaaaaatatgtgcagttgatatgtgggtcttatatatatttttttaatttttttctgactaggatgacacatcagcgaaaccaactatgtatactgccataggaccttgtgtgcacggtttgtgtgagtttaggggtaaacatttctggttttgtagttaagtgatcttaaaaaaaatctcgctgttaaattgaaagacctctggtgaacttattccaaaaaaaaaactcccccatcgatacggcccactttgaccggcccattcatctgggccattagaaactggaataagttcactggtcatccctcaactttacaccgagatttttcgaggtaccttaaccacaaaaccagaaatctccacccctaaactatacaaaaccgttcactcaaggtccctagatagtatatatgggtggttttattgacgtggcatcctagtcagcaaaaaaaattaaaattaatatgtggggcccacgagtaagtgagacaatgttgtgggttccacatttctcttttttttctctcttctcttctcttctctccgagttctctcgagcaggcgcggcgacagagggggagagaggtggccggcggcggagcggggacggcggcagcgggagagggagagagaggcggtccgcccgatggcagcggcgggagaggaggaaaggtggcggccggctcgacggcgagctcggcggcggagatgttcgaacgcgccgggtgctcgaccacaggtcccgtcaccgcccgccggcgagcggagctccccgtcgaccctctctccctccccaaagcggtggggctactccgctgccaaaaagagctgctgcctccactagatgaactacctcagccccgacctcaagcgcggcaacttcaccgacgacgacgacgagctcaccatcaggctccacgcccttctcgggaacaagtaagcaaaacaaatttcaacatgttgccatctgcttcggttagctcttcttgtgttcttggtgctgattgattggttttgcaggtggaacacgcgcatcaagctcaagctcttgagccagggcatcgatccgcagaagcatcagccagttagtgcccggaccagcgttgctgcggcaagcgagctaaccacgacggccagcactgtcagctttccgcccctagcaccggcgccggtgcgagggagctcaaggaggaaggagggaaggctgggaggggtcttcctcgtagtcgtcgctggcggcagaagggtcgccgcgtgctcgcccattgccgctctgccaccgcgctcgccctccgcttctctgcccgctgtcgcgctcgcgctccactgctcggcccgccgccgctccgctgccgcgctcgccctccgttgcgccacccgcatcctggctcgcactccgccgctccacccgccgccgcgctcgcccatcgccgctccgtcgccacgctcgccctccgcttctttgcccgccgctgcgctcgcactccactgctcggcccgcctcgctcgcgcccgcggccgctccgctgccgcgctcgtcctccgctgcaccacttgcatccgcgcgcgcttctccgcctaccgccggcctccctcactaaagtttagaaagagagaagagagaaaagaggagaaggagaagaaaaagagaaacaatgtgctgctgacatgtgggccccacgtactttttaatttttttttctgactagaatgccacgtcagcaaaaccacccatatatattgcctagggaccttgagtgaacggttttgtatattttagggatgaagatttctggttttgtgattaagggaccacaaaaaatctcgctgttaagttaagggacctccgatgaacttattccttagaaacttgtgccaactgctgaacggtccaatactaggtctcaccgggagcgtgaagcccgaaacggcacgcggaagcgcgaagcggcggccgccgccgccggtcgagcgggacggcggcggcgctgcgcggcgcgcccaaccccccatctcctagatcgtgtcgtgcgccactcctcccctcctggctccgccgccgcggcgcccggtgaactcgtcgtgtgtctgggacctcacctctagggatccgacgagcgacgatggctactcctcccctccgccgcggcgcccccaccaggtgataaactcgaaactacaccgtactggcctgaatcatctcgttacggaattccactaatttgttttgctgcaagatgttggttgttgttgtatgaaattctcgccattagtctatggtggatcggagaagtggcattatttagcagtagtaacttagaaatccgctttagttcatacgagtatttcatactccttagttgcgagtgttgatatgagaaaaaaaaagtgttggggtattggctattcctgaaaaaaaaaaccgtgtccctacttgttgaaccacacatcaaaagttacagaaggaagttttctgcattgttcatggctcattaggttcttagaaaaaagaagtgctaactggaagcagttgcataaataaattaataaacacatatctgaaagccaagaattttgaattacaagccgatactaggtaaaattgattattcctgccctaatgtttttgctttgtgattctattactcctcgactataaggaggagcatcattctgaatttctaccgaaccttacatcttcttaaagtccatatgggctataattctgtcaatatataataccgttatgaacatcatttctgccactgatcatgtcatcatggtgttacatttgtactagtctgcgtgtgctgtgttcaatagctatggaggtttccaatatatatagcacaaaagaagaaagaaatgcaacctaatatcatcattacaatataatatcatcattacagtatagtcccaacagataatgcaagaaaagaaactacaagcttcatacatttctatatactgatagagcaatgtgaggaaaaacaacccattgtcatagaaaacaactcatttgaaccgtgtgttgtttggaaatgggtgctgtcttgccatgcaaaacctcagagctggacctgctggttgcctgcttgttgcaaactaaccaagctacaatatgttccagagaagcccttcgccatgagggatgtgtgtgtgcccttctctacaattgttcctttttcaagcatagtgataaggtcacacttttgtataatgctaagcctatgtgccaccaccacacttgttctgccaaccatcactctgtccagtgcctcttgtaccaccttctcggattggctgtccagtgcacttgtagcttcatccagtagcaagatagctgggttcttcaggatggcacgggcaattgcaatgcgttgtttctgccctcctgacagctgaactcctctctcaccacacaacgtgtcatatccatcctttaggttgctgatgaagtcatgtgcattagcagaccttgctgcatcctcaatttccacctcgctagctatgtctatgccatacacaatattctctctgattgtaccagcgaatagtgttggctcttggctgaccagtccaatatgccgccgtagatatctaagattatatgctttgatatcccttccatcaatcttcaccgaccccctaattgggtcgtagaacctctctatgagcccgatgatagttgatttgccggagccacttttcccaactatggcagttgacttgcctggttggatgctcaatgtgaatcctttgaaaattattacatctggccttgatgggtatgaaaaatcgactcctctgatgtccacctcgcctttgagcttctctggcttgtatccatgagggttgttaggatcgatttctgtttcccgatcaagaatagaaaatactgaagcgactgcatctgcacccttggctaggtctgttgtcatgcttcctgcctcttcagttacacgacatgtatttattagaatataaaaggtttggaagagctccgtgttagtaatttggtggtcagccacaagcctgccacaataccaaagttcaagggcccatgtgcatatcatgaggctcatgggggtaccaaggccgagccctgcaaaccatgattgacggatgctttccttgcgtgctccatcttgtgcttggttaaagaggcgtaagatgcgctcttgggatgagaaagcggtaaccgtttggagattggagactgcctcagcagctagcttgctacttttagcttgtgcatattttgatttctcggacatgctcttaaataagacacgacgaacataaaagcaaacaatgatgggaggctgcatcactatcatgaaaagggccaaacgccaggcaatgatcagtcccatggtgtatccaataagtattgttgaaattgtttcgatcataagagccatttggtcacccacgagagacctcacctacaataataggatagcaggtcacttactattatgttttaatcatatacatacatatttttatatatgcacttactatgttggcgtccttagctagctgtgagcataaggcgccactggagttcttgtcatggtcaaaccacccaatttcgaaggtgaggatctttgcaagcatctgttctttgattctcttggtgaggtattcccccattgcaccaaagttataatgctgcccaatatttagaaaaaatgacagcactgcaagacctaggaagatgagtgcgttggtccttgttttgtccttgatttctgcatgatctgtcaagaagtaggctgagatcatgcttcccaaggtgtatgaatacgtaggttggatgcctccaaacaaaattgcactaaaaccccccattagtgattgcttccattctggtgcattaagcataaatagccttctgaaggatggcactggaagcttttgcttcttagtgttgtcagcatctcttgcatcacccaatgaccttgcggagtttgacctgctaactgtagagaacctcctggtcatgatgtggatattggactgctctacagcagatgtactacctgttacacaaatttgatcaatctcatttgaatctctggtctgttgaaggtgcacaagagatgaatagaggccattctcattagcaatgagctcatcatggggtcccagctccataacctcaccggactgcatgacaacaattatgtcagcattgcggatagtggatagacgatgtgcaattatgatagtagtccggcccatagatgccatgtctagggcctcctgtacaatgcgctctgactcagtgtccaatgcactagtggcttcatcaaggagtaggatcttgggtgacttcaggattgctctggcaatagcaattctctgcttctgccctccagacatttggacaccgcgctctcccacctgttgttttatttcaaactaggttatcactagggttggaatgcttataagctaaacattcttgaaattcttaacgatatgtgcaagatattgacatgaacactaaattgatgggttgtatagacaatatgaaagcgtcattatggtaagtatattattatcttgtttcagctcatttgattgttagaagtgagcattctaccctttattgctaaccacaaacaaacataatcatggacaattgattagatcgcacttcttaaactgtgagataatgttggcttgccatgtctccttgttgtttcataaagatctctaaaatctttgtgcaacattaaatacttccctagattattgagttacaaggcagcagattgctattatcctcctacagatataatccagaattccagatcatactcttacttgtaataataccctgttcctttacccacgtcaaaaccctgctttacaactgattgaaaacacttgagaatcagtagtaaacaaatactagtaaccactctttaggggggatgtgcacatcaggttatcttgattcctacgtgtcacaccttcaaaaatcaaacgcggtaacttttggctaataattacactaataatatctatgttagtattatatattatgtatgttatatagttagattcgtattttaaaatactttcaagtgatactaatattatagttgttgatgacataatatgaaataaattaataattaaagtatatcatcaaaacttgtgtagaaaaaaatatgccttataatttgggacagtgggaatagttcattaacacgttatttttttttctgcagcagattacatgcatgtgcaaattgctggaatgttcggtgtataactaattaatgatcaattaaacacgataaaatagtggaggtggctatattttggatgacaatattaatgagagccggtttatattttcggggttagtactatttttatccatgcatcatcttcaccccttgcctctacttttctggaatactatagtctcctatctttaattatttgatggtattgtttatagtaccgtagattaactaaggcctttttaatgctttgatttgaaattgggcagttgtacgtagcagcaatattgatagaggcatgtacaatataatgtggccattccgttctgttgttgtacttgggacaattacgttaattcttgcctaaatataattgcgattctctataattttttagacgtgtaataattttaagcgaatttttttctgaattgcaaattaacttttgtgcacttgctctgtcctaaaatatatttatttttcatttatcacaaaattaaaaaaactataatatccttactttatcaaatctcaatacaactattttctattttatctactctcagtacaatttttccctattccacaaacttcgatctaaggattactttataaataaacttattttaaaacaaatgtaaaagatgagcttatatgctctaagagcggccacgagcccacgacgtgagatagtcttccctctctgctagctgtacgagacgcaggccggtggctgtacctgcctccggcaccaccatcgagctgaagttcttcaccacctgctcgtattggcaaaactatgtcttaggtggagtggtaattagctggtttggatgaatatataatgtggaaaatatccatgaatcatagattaggccagacccatgcatattcaccccaatcatatgcaatatatgcaggtcctgaccctatcttactttacttatgttcagtgcagatcctaacgtcgaagtggtaagccgaaacgataaggtggacaagatccgctcctttccatcctctcgtgcatgaccatgtggtcggtggctccccgtccgtccctagattacccttatgctcacggctatgctttaattggaagatatacaaaatagttaaccctctccggctcttccatatagttttaaacaaactaattaaaaacaaatttagaaaagaaaaaaagaagtctacttagacatattcgtgtatataaattttatacatagtgtatacgcctttactttatacactttttttacaaattttatgcatattcgtgtaatgtaaacttatattaacccagttaataaaaataaacatatgaaatttttttattggtatatataaaaaggtttgtgtataaaactttgtattgatatgtatagagcataagtgtgtgtatataaatcttatatataaatatatacacatttgtggtttgtacatatttatataagttattataaatattgatactataattgcacataaagttttattcaagcagtaaatcttgtggtgagattctttttggagtctgaacagcccaatataccaggtctgacactggcagaaagcgtaaaaccaggtatacgtaaacggcacacggaggcgtatattgttgttctcattccccaaccactcgatcacctcgccgcgagaggcggcggcggcggcggcggcggcggaacgcgttcgcggggattccgaccaagcccccatctccctcgcgccgtgcgccactctgccaaccgcgctccgccgccgcgtgtctggggaggggggggggggtggtctctccaccatcctgctcgcagtcggcggcggcggagaattagtttcgaatttgtgggggttgggggggcgcgcctcgcccatgtgcaagcctcgccggaaaccagtccaaggacgcctgctggtacctccccctcgcgcgcctctcgcttggtttttggtagtgacctctcgctcatgcctccctctccctcgcagggcatgtgcagaaagctccgggagaggaagcggagggttagcggccgccagagatgctgagaaggacgatctcgttatccaggaagcggccaccattgaggatcccaaaattcatcttgatgctggaattgaatcgagcgtgcgcgcatgcgtgggtttgatctctgaaggaacgagttgttgacgaagagggggcaatgagatcgatgtgaaagacaaggaggaaaaacaccatgtcgatgagctctacactatggcagtggcggaccacctcaaggtttgtagccgagtagagcttcaatcaggggcggagccaggattttgaggcaccggggtcacattagctagcctaagctactgccatatttgatagggctctaattctaggatcaattttttaggctacatatttttagatccaaaagtttttggaaataaattaatggtggattgaggtaatttcggtgggatatcattgttttagacttatttagactataaactctaaagtaggcaataatttatgagctaaaaccatataaaattgacgaactatgcctaattattttggcaaaaacgttcttaaagttgtttattaacttaaaaaggactaatttgtactactacttgagtagaattactagctagcctaatttcatgtataaacacactacatagctaaaaatagctaatctgttaagtgctcaaacatgctatgggtaagctgtgcgatggtggtgagcagttctcacactagcctgtaactattatgcattgctagtagcgtttagtctgtgaaccgctgcagttcaatgggccagggtcaacaagcatcggctaatggggtcactgcttgcaatatacgaaggaacatactggttggtcagatatcgtcggtgtcatctgaccccagtgatacaacgtagctccgcccctggcttcaatgtactcttgtaaggctagatttttaatggttttaacgtgttgtacattgtacgtgccaatatatttttgcttataggttaggaagaattcggaagagagctcaacgcagtggaccaccggcattgctgaagttcagccgcctattaagtaagttcacgtgtcccttcttttgttcatgtttattaaaataagtttacactgccttgtaccatcgatgtgtcccttcttttgttcatgtttattaaaataagtctgccttgtaccatcgtatacgcagatcatcacccaaaagtatgttcaaaactgcactagcgtgaatcagctagttgcggcattctctaggaatatttctgtccgtagtttcatatgaaaccactggttgttttacagcaagatgttggtagttgttatatgaaattatcgccattaggtttaaggcagattggagaattggcattagttagtaaattagaacccctttatttcatatgattattcgtactccttagtttcaggttttgatatggggacatgggtatactggacatcccccccaccccccccccccaaaaaaaaaaaaaaaattctccttacccgttgaacagcatatctaagttacaacaaggaggttttctattttgttcatggcccactacgttcttttaaaaaaaaacgtgtgaactggaaacagttgcctaaataataaacacatatttgaaaaccaagaatgttgaatttcacattttgcaatacctgtgtgaaaattacaagccaattgtaggtaacattgatatttctgatccaatctttttgcattgtgatgctattactccttgattgtaaggagcatcattctgcacttaaaacttaaccttacatcttctaaagcccatttgggatccacgtgggatgtagaggctgtattgatgtccattatctaaaaaatattctgaaagcccataagggcaataattctttcaatatataatacctttttcaacatagtgtcttctgcctatgatacattgatcatgatgttgcattgttactacttactagtctctgtggtactgtgttcaatagctatagtagttttcaataaatatggaacaaaagaacaaagaaacacaacctaatatacaacatatctcatatttttttgatcttctcatcattacagtaaaatttcagcagataattcaagaaagaaaacttgcaagcttcatacacctctatatacagatagagcaatgggagagaaaaaaaaatcccagtttcataaaattttaaatgataaggagcatccttgcttgcagttctaatgactgattgaaccgggtgtgaatttggaaatgggtgctgtattgttgtgcaaaatctcactgctggacctgctggttgcctctttgtttcatactaaccaagctaaaatatgttccagaggggcctttggccatgagggatgcgtgtgtgcccttctccacaactatccctttttcgagcacagtgataaggtcacaattttgtatagtgctcagcctgtgtgccaccaccacacttgttctgtcaatcatcactcgatctagtgcctcttgtaccactttctcggactggctatctagtgcacttgtagcctcatccagaagcaggatagctgggttcttcagtatggcacgggcaattgcaatgcgctgtttctgtcctcctgatagctgaactcctctctcaccacaccacgtaccatatccatccttcaggttgctaataaagtcatgtgcattagcagatcttgctgcatcctcaatttccgcctcactagccgtttctgtgccatacacaatgttttctctgattgtacctgcaaatagtgttggctcttggctgaccaatccaatgtgccgccgcagcgctcgaggattatatgctttgatatcccttccatctatcttcaccgaccccctaattgggtcgtagaacctctctatgagcccaatgatggttgacttgccagagccactttgcccaaccagggctgttgacttgcctggttggatgctcaatgtgaaccctttgaagattataacatctggccttgatgggtatgcgaaatcgactcttctgatgtccacctcgcctttgagcttctctggcttgtatccctgagggttgtcaggatcaatttctgtttcccggtcaagaacagcaaatactgaagcaactgcatctgcacccttagctaggtctgttgtcatgcttcctgcctctgcaattacacgacctgtgcttgctagaataatgaaggtttggaagatctccttggcagtaatttggtgctcagccataagcctgccactataccaaaagccaatggtccatgagcatgccataaggctcatggcggtgccgaggccgagccctgcaaaccatgattgccggatactttccttgcgtggtccatcttgtgattggtcaaaaaggcgtaagatacgctcttgggatgagaaggctgtaattgtacgaagattggagactgcctcagcagctagcttgctactttcagcttgtgcatgtattgatttcttggacatgctcttgagtaagacacggcgagcataaaagcaaacaatgatcagaggctgcactgctatcataacaagggccaaacgccaggcaatgaccagacccatggtgcatgcaataagcactgctgaaatagtctggatcaccagagccattcgatcacccacgagagacctcacctacaataacaacaaaagtatgtcaggccagtcacaattccattttaattatctacaattctacatacttattttgatgtatgcacttacaacgttggcgtccttagctagctgtgagcatatggcaccactggagttctcgtcacggtcaaaccacccaatttcgaaagtgaggatctttgcaagcatctgttcccttattctcttggtgaggtattcccccattgcaccaaagttgtaatgctgaccaatatttatcaaaaatgagagcactgctagacctacgaaaatgagtgcgtaggtccttgttttgtccttgatctccgcatgatctgtcaagaagtagactgagatcatgcttcccatggcatatgcaaatgctggctggatgcctccaaacacaactgcaccaaaactccctattagtgcttgcttccactctggtgcattaagcataagtagccttctgaaggatggcactggaagctttggcttctcagtgttgtcagcatctcttgcatcgcccaatgaccttactgagcttgacctgctagctgcagagaacctcctgctcatgctgtggctgctggactgccctagagcggatgtactaccaattacaccaatctcatcaatctcatttgaatctctggtctgttgaaggcgcacaagagatgaatagaggccattctcattggcaatgagctcatcatgcgatcccagctccttaacctcaccagactgcatgacagcaattatgtcagcattgcggatagtggataggcgatgtgcaatcacaatagtagtccgccccatagatgctaggtcaagggcctcctgtacaacgctctctgactcagtgtccaatgcactagtggcttcatcaaggaggaggatcttgggtgacttcaggattgctctcgcaatagcaattctctgcttctgccccccagacatttggacaccacgctcgcccacctgttgtttttatttcaaactaggttattactacctccgtcccaaattatagctatttttggctacaaatctggtcacgcggttgtttagattcatagctagtaatgcttatattttgggatggagggagtactaggataggattactgatatgataaacatgtttgaaatgcataacagtatgtgcaaatattggcatgaatatgttcttaaaaagaacatgaatactcagttgcaagtcctatagacattatgaaagcatcattatgccaaggatattgttatcttgtatcaggagtgacatcagtttcttttttcatggaaaaattttggctgatcatttgattgttagaagtgaacattcttacccattagtactaatcacaacaaacaagcataatcactaactgatgactgatggaagtgagcttcatcaactgtgagatggtgtatgtctcctgtctgtttcatgaagatttctaaaatctgtgtgcagcatttataaatacttagcctgatttcatgaacactgcgttgaaatcatacccttatttgtaataataccttgttcccttgcccacatcaaacgcctggttttacaactgattgaaactgtttggcttaggcccagttctttttctcaactacaaacttcaactttctcgttttctgttagcacgcatttcaaacggttaaatggtgtgtttttagcaaaaagtttctgtgtaaaagttgtttttttaaaaaatcaaataaatccatttttcaattttataatagttaatgaatcatgtgttaatgagttttatcgtttcgcgagcgctgaaaatatccctccaactgggagagaacgaacagagccttggtgttaaacaatagccaccattgctttagcggatggataggcacatcaggttatcttgattgcttagtaaagtttttcggtggttatacagttatgcttgccgtattttaaacacttcaactagtattttgcagtactgaaatggaccatctttctttcagatttatcttctaggaaacaagttatgttccctggcgataaaaaaatagtcaagtggcataacttctatacaaatagaagcatgcaaggtaatgattatcaagtatcaacatcaaaaagccttctccgtatttgtatgagtgagtatgaaaggtctagtttggtcctctaatattagatctacaatacaacatgtgagtggatgattagtcagtacatgctctaggaaatcttgttgaactaatagtcgcaatatttatcattgaatactgtagatgcactaccagaatttagtatttgttattttgtagcactctttcctgtcatgttccaatgagtgcttgaacagtgaaaactaaagtaaagctatcaagtgcctgccattatttttgtgaaactcacagcattgcagatattaggtggcagatatctggcaaagaggatttttttttagtgctctgtcaagtcatcttgttaacaggtttgcccatatcaaaatctaatgttaagtgccccacagcaggtttgcaaaaagtagagattactagtgctggggtccaaccaggaataaacctttcctgtttcaaggtttacatgcatgccacttagtatccgtatcattacggtgatttttcattattagctaggggctgcatatcaaagaagtcaaggcagccaaaaaaaagatgtactcttttaccattataaggtttaggttcttttgagtgatttgcattggtagcgaaggaacaaatcaaaactaatattgtgcgaatcattttaattttccataggtgaaactgccttttggatgcattcatgccacatgcacacaggcaactttttctgtgaaggcctaccatattgctgtcacaatcgttggtgcctgatatataggtcctgggtgaaatcctgtttactgggaaagttggagcaccataaaattgttgattgggaacctcttttctgttttctagatttgcaaaaggcctctagctgcttacctgcagtgtccaccgaccatggaggcacacctaagtggtgggtggggaggaagatttcttatcccgaccaaaggaagggtctagcttcccttaagattgggggagtcccaacggtttcttgccttgctcgctcgtgctcatcgtgttttaaggttgctagttttgtttccgtggttaaggttgctagtagtgtgtttcttgttcttcagggtttagccccttttttcccaattaaccgtgcactgtgcggtttggcatcgtcctctccttaaaatgagaaaccttcttctttaatataatgctggtaaattcgccgtgatctttaaaaaaaaatgcactcatcgctctatgactcctatgtctcaccgtcaacaatttcctaaagcaggtgctttgaattttgataccgccatcactagaaatgaatctggatggcacggtctatatagcagccataggggtagttctgcaactgtatgctacatggaaatatggccatccacatcatgcaggctaagttgagtcatcatcatgttgggagtgagatcgagaaaccatgcattgcaattgagggtatgagtgtgggttgctatgttgtctatgttcacatgcagaaggagcagtaggtcccactacaaccgcagctagatgttaagggatatagttggttctacatccctaatttttttgcaagtcattcattcaatattgaaaatgatattatttctaatccaattgcaaatggatggtggactggcaggtctgctggagagaaactatgctgcagccgcaacgaagaaggcacaccgcaaggtaacaatttaggtatttctgtgatagtccagagttattttttgtattctctttttgttctgctatggctattcatgcaatgtagacgatcttatgatgttattgtgtgcgtagtaataagcctttagtttgtatgttttatttgttccgactttcaggactgctatagtcttttgtgcctgattggggatattttcactcttcaggtatctgtaatttttacttgtttactgaaaacatcttgtagtgaactccttgttccataaccctttcatttctcctagttcctgtttaggttgtgtcattaatcagatatgcttataccctaatagtcttggaataccttgataatttagagtgtttaaaagtacacttgacttggatcgtatatttgtatgcagtcctccctcatcctattcactgggacaggtagattatggatgcctaagctattttaaccatgtaaagcattttcaagctattgagcttttataactgattactgttttttgcactgtaatgtcataccgtaatagtgggtttcttgttattttaaggttaattttcgtttatttgtagtaatgataatagcgtaatctagtcgtgtcattatttttggtgacaaaaggcagacagctctctgaatctcagattgcatcagtgtgcctttttctgttaattttcttctcttgagcagtagagagagattgatgctaattctgagataatttacctgtgtgtcgtagccctgaggcagctgggagatgaagctgtgtgcgttggccgccttggcggcggcgatcacctcctccgctgtggcgtcctccttcccgaacaggatgttctcccggatgctggtggcgaacagcgccggctcctggctcaccagccccatctgcgctcgcagccactttagccggagcctccggatgtccacgccgtcgaccatcacctcgccggccgacgggtcgtagaaccgctccagcagcgcgatcaccgtcgacttgccggacccgctaccgccgaccagcgccacggtgcgccccgccggcacgcggaggttgaagctgacgaagatggggctctccggccgtgacgggtagcagaacttcacgttccggaactccacctcgccggcgacgttgcccagctcctcgccggtgtcgctctcggagtcgatcttgggcacccgccggatcacctccaggatcctctccgccgccgagctcgcctccgagaggtacttcacgttcgacaacactgacccaagcgctctgcaatcccatgcaagtaaggcacatcaatggcgtcgccgtcgccaagaattatacatagtgcaggatattacgtacaggccgccctggataacggcgtaggagacgacgaagacggtgccacccttgtagccatgggacatgacgaggcggcttccgtaccagacgttgaaggccaagatggcgaaggtgatgccgttgctaccgatggcgacgcccttggcaagcccttgcttgagccccagtcgcaccgactcctcgagtgccgctgagaactgagccatggtcgtccgctccgccacaaacgagtacaccgtgcgcaccgacgacatggcctgctcggcgatggcgccggggcgggtgtactgctccctgatccggcgagcgaggtcgacgacgacgcggccgtacatgaatgtcgggatgatgagaagcaccaccgacggcagcgccactagcatgagctgcctcatcagcgcgaacccaaatgcgtagttaccgacgaacatggcggcgttcatgacgaagttgggcaccttctcgctcagcacgtcctgcaccacgaggctgtcgttggccacgctggtgatcacctccgccgtcgaccccttcttcaggtcgaagtactccacgtcttgccggagcaccgcctgaaggtaccgtgcccgcatccgcgacgcctgccgctccgccgtccgtgtccagcaatacccctctgtttgtacaacacacacatcgccggcgggagtcagctcgcctcgccatcgccggcaggcattggaattcaacaggtgaccctatgctcacctagaaacgtcatgacccactgaccggcggccaagaagaggaggttcctcgcgttctgatgaaatggagatcaacacttcaattttcaaaggcaaatccaattcgatcatttcagttgaggatcgagctgggcgagtctacgaggggtgcacgtaccatgttaaccttggagctgaactcctggacgttgtcggcgccgccgccgaagttattgtacacgctgccggtgatgagcagcaacaccggcatcgagagtccgtcgcccacggcgcccaggagcccaagcaccatcaacaccacgtccaccgcgtccgcgtgcatgaacaccgtcatgaacgatccgagcactggcttcgccttcccggcgctgcgatcgtcgccacccatggccgccgtgatgccggctggttcaggtaggttgctactaccgttgcatcttccaagtgtaacggtttgtagttgagttcggacttgagagagagcgcgaggccttataatatatttgaactgatttggctggcgtttgaataaatgattcgatatcaatagagattatgaatcaacttgatatgaatcaaacatgatatggattaacctggcactccagtcatatattaaatggatacgatcagaatgcattagtcaaggggatgtgcatatgtgatccgttgttgcaatctgatagctttgctgtcattctttatcttttaaatttccacgcatttcaaatttgatggcctcttcaagaacaatataagaatgtttaacttttattttgtacaatttcgcttttcatggaaaaaaatatttatgtctgtatctatatccgtctatactaattgaacacttgagcttccaattcaatcggaaagatcttaacgttaatccatatcaagtttgatttcatattcgctcctgatattgtatcaattattcaaacatctgcaaaagatattataaggcctctctctcgctcactctctacttctcaagtctgagaggctaccatctaaacggcctgaagaaaaaggaggccaaactatacaaactcaagtacaaactgtcacaattggaggaagcaaagctagtagcggtcaaggccatgggtgtgagtggcgacggagacggcgccgcgaaggcaaagctggtgcttggatcgttcatgacggtgtttatgcacgcggacatggcagacatggtgttcatggtgcttggcccttgctcttgggtatcatctatagttgttaaggtgaactcttccttagaagaaacaacacccttcttggaagaaaagacaacttagaaaaaaaaaagtaaaaacactgtcggtccttaaacttgtgtgttggtttcaactagatccgtaaatttagaaaatacatctttagacctctaagcttgctaaatataccaacttcggtctaaaatttgacatggcgtgtcacacggacgtgatgcaacatcaccactagccctgcaccaaatgacaagtgaggccaccacaatttattttacacttttccttttttttttgccattttcttttcccatgggcgagaccgagcttgacgttggttacctctggccgcttgccttgacccgaagttccctcggacctcggtcctgctcactgccatacatatcctcgtcatcaacgcctcctcccatcacaacaccctcttctgccaccgtttggttgtcatccacacgtcgccgggccactggacctcaagcttcgtaaagcccctaggaatggcggtgactgggagcgagagccttagggtagcgacgggggccggagagctggatgaccgcggctgggcagagatgaacgacgacgatcagggcgatctaaacaatggagtttgggtgaaagagctcgagcgcatcacgatggtggggagctcgatggtagctgcttgacacgagcagaacgatggccatggcgacctcgagaacaacgtaaacaactatggggttgggagccccaaggtcaatggtggaagaagagagaaatgccagaaaaagagtaggccctactctcatttcaggattagcgagtgtgttatattagcatccatgtgtcataccctgtcgtattttggaccatccgtgatacctttagcaagttgagatgtctaacacacgtactgatcactccgttctggtttactcgacaattttgaacaaaaagtttgtttacaaaaacttggttatgcatgaaatccaatgcctactttccaatttttactcccataacaaacaatcatatcccattcacactaatctataaagttgttccacttacttactacccattccagtaaataatactccctccatttcaaaatgtttgacaccgttgactttttagtacgtgtttgaccattcgtcttattcaaaaaatttaagaaattatttattcttttcataccatttgattcattgttaaatatattttcatgtatatatatagttttacatatttcacaaattttttttgaataagacgaacggtcaaacatgtactaaaaagtcaacggtgtcaaacattttgaaacggagggagtatactagaggcaaaattatcatatctaaaatatactattttgttttggaggtatatctaaaatgtataatgacggcctacttttcaagtgcatagtcaaaagtaacaaataaaagagaacggttgggaaaattttcaagttaatggacctgtatactaaaagagataatccaagaaatgccattgacaaacgttcaactctaagaaatactattaacaagtgtgagttccaagaaatgacaccgtacaaatgactttgtccgaaaaatgccatcgccgttaggattccgtccatcccacgccgttaagtgctataggatgaacaatttatttaacggcatgggatggacggagccttaacggcgatggcatttttaggacaaagttgtttgtacgatggcatttcttggaactcacacttgttgatgtcatttcttgaatttggacacttgtcaatggtatttcttagattatctcataataaaataacacccatgttattttaggatcatgaattttactaaagaaaaaaaaggaaaggaaacaccccacaatgcagcccatttctaacggcccagtcctctcggccttcgattattcgcgtcaacggcgaacggcccaatccccaataccaaggtctgacactacaccaaagagaaagcgtaaaccccgttatacgtaaacggaacgcggaggcgtatgctgggccatcctgctcaattcgacctcgccgccggccacccactcacccaccccgccgtgagcgaaccctacccagacctcgccgggaaccagtccaagcggaggacgccgccgatcactccgacgacgaggacgcccgcccggtaccctccccgcccccgccgcctctcgctttgggttctggttgtgacctccctctccctcgcaggtagcgtctctctggaggagatcaagtacgtgaggaaggagacaaagatgctgaggaggaggatctcgttatccaggacaggaggccgccgtcaccatcgaggattccaacatccgcgtttaacttcgtgtgtgattcctcttgccaatattttgcttcattcatcttgtgatgccggaattgaagcgagcgaggcgtgcgtgcgttgcgtgggtctgatctttgaaggttgagatatgtggagaatgagctgttgaagaagaggggccaagaagattgatgtgatagacaaggaggagaaatgaccaggtcgatgagctcaaggtttttagccgagtagagcttcgatgtactcctgtaagcctagatttttcatggttttgatgtgttgtgcgttgtaatgatggtgccaatctgtttttttgcttataggttaggaagaactcggaagagagctcaacgcagtggatcaccggcattgctgaagttcatctgcctattgtgtaagttcttgtgctccttagtttgttcatgtttattaaagtaagtttgcactgctttgtaccatcatatatgcagatcatcacccaaaagtacgttctaaactatactggcgtgaataatctagttatggaattctctaggaatatttctggccataattgatgatctgtgaaccgctggttttgttttactgcaagatattggtagttgtcatatgaaattctcgacattaggtttaaggcagattggagaagtggcattagttagggaacccctttagttcatatgattatttgtactccttagtttgcaagttttgatattgggacatgggtattagtgcttgacatttccgcaaaaaaacgccttgtccttacctgttgaacagtatattgaagttacagcaaggaagttttctgtttagttcatggctcactacgttcttaggaaaaaaaagtgtgaactggaagcagttgtgtatataataatcacatatttgaaagccgagaatgttgaatttcacattttgcaatgcttgtgaaatttacaagccaattgtaggtaaaatcgattagttctgctccaatccttttgctttgcgatgctatcactcgattgtaaggagcatcattctgaacttacacttaaccttacatcttctgaaatcccatttggggtccatgtgggatgtagaggctggattgatatccattatctaaaaaatattctgaaagcccataagggcaataattctttcaatatataatacctttttgaacatagtttctgctacctgtgatacactgatcatgatgttacactgttactagtctgtgtggtactgtgttcaatagctatagcagttttcaatcaatatggcaaagaagaataaaaaaaatgcaacctaatatacaacttatctcatcattacagtacagtcccagcagatatttcaagaaaagaaaactacaagcttcatacacttctatatactaatagagcaatgggagaaaaaaaaatcccattgtcacaaaatttcaaatgataaggagcatccttgcttgcagttctgacgactgatttaaactggggtgtgaatttggaaatgcaagctgtgttgtgatgcaaaacctcagtgctggacctgctgattgcctccttgttgcaaattaaccaagctaaaatatgttccagagaggcccttggccatgagggatgcgtgtgtgcccttctccacaactgtccctttttcgagcacagtgataaggtcgcagttttgtatagtgctgagcctgtgtgcgaccaccacacttgttctgccaatcatcacccgatccagtgcctcttgtaccactttctcagactggctgtctagcgcacttgtagcctcatccagaagtaggatagctgggttcttcaggatggcacgggcaattgcaatgcgttgtttctgccctcctgataactgaactcctctctcaccacaccacgtgtcatatccatccttcaggttgctgatgaagtcatgtgcattagcagatcttgctgcatcctcaatttccgcctcactagccgtttctgtgccatacacaatgttttctctgattgtacctgcaaatagtgttggctcttggctgaccagtccaatgtgccgccgcagggctcgaagattatatgctttgatatcccttccatctatcttcaccgaccccctaattgggtcgtagaacctctctatgagcccaatgatggttgacttgccagagccactttgcccaaccagggctgttgacttgcctggttggatgctcaatgtgaaccctttgaagattataacatctggccttgatgggtatgcaaaatcgactcctctgatgtccacctcgcctttgagcttctctggcttgtatccctgagggttgtcaggatcaatttctgtttcccggtcaagaacagcaaatactgaagcaactgcatctgcacccttagctaggtctgttgtcatgcttcctgcatctgcaatcacacgacctgtgcttactagaatcatgaaggtttggaagagctccttagcactaatgtggtgctcagccataagcctgccaccataccaaaagtcaagggcccatgtgcatgtcataaggctcatggaggtgccgagtccgagccctgcaaaccatgattgccggatgctttccttgcgtggtccatcttgtgattgttcaaaaaggcgtaagatgcgctcttgggatgagaaggctgtaattgtacgaagattggagactgcctcagcagctagcttgctactttcagcttgtgcatgtattgatttcttggacatgctcttgagtaagacacggcgagcataaaagcaaacaatgatcagaggctgcactgctatcataacaagggccaaacgccaggcaatgaccagacccatggtgcatgcaataagcactgctgaaatagtctggatcaccagagccattcgatcacccacgagagacctcacctacaacaacaacaaaagtatggcaggtcagtcacaattccattttaattatctacaattctacatacttattttgatatatggacttacaacgttggcgtccttagctagctgtgagcatatggcaccactggagttctcgtcacggtcaaaccacccaatttcgaaggtgaggatctttgcaagcatctgctccctgattctcttggtgaggtattcccccattgcaccaaagttgtaatgctgaccaatatttatcaaaaatgagagcactgctagacctacgaagatgagtgcgtaggtccttgttttgtccttgatctccgcatgatctgtcaagaagtagactgagatcatgcttcccatggcatatgcatatgctggctggatgcctccaaacacaactgcgctaaaactccccattagtgcttgcttccactctggtgcattaagcataagtagccttctgaaggatggcactggaagctttggcttctcagtgttgtcatcatctcttgcatcacccaatgaccttgctgagcttgacctgctagctgcagagaacctcctgctcatgctgtggctgctggactgccctacagcggatgtactaccagttacaccaatctcatcaatctcatttgaatctctggtctgttgaaggcgcacaagagatgaatagaggccattatcattggcaatgagctcatcatggggtcccagctccttaacctcaccggactgcatgacagcaattatgtcagcattgcggatagtggataggcgatgtgcaatcacaatagtagtccggcccatagatgccaggtcaagggcctcctgtacaacgcgctctgactcagtgtccaatgcactagtggcttcatcaaggaggaggatcttgggtgatttcaggattgctctcgcaatagcaattctctgcttctgccccccagacatttggacaccacgctcgcccacctgttgtttttatttcaaactaggtcattactaggataggaatgctgatatgataaacgtgtttgaaatgcttaacagtatgtgcaaatattgacctgaatacgttcttaaaaaaaaacatgctcagttgataagtcctatagacactacgaaagcataattatgctaaggatattgttatcttgtttcaagggtgacatcagttttgtttttcgagaaaaaagttggctcatcatttgattgttagacgtgattattcttacccttttgtactaatcacaaacaaacataagcactaactgatgagagtgaacttcataaactgtgggtgtcggtatcccatctgttccatgaagatttctaaaatctttgtgcagcatttataaatactttcccagaatactgagttcaaatcatacccttatatgtaataatactctgttcccttgcccacatcaaaagcctggttttaaaactgatcgaagctctgaggcgcagtgttaaaaaatagtcaccactgctttaggggatgggataggcacatcaggttatcttgattccttagtaattttttttcagtagttgtacagttatgcttgacatattttaaaaggttcaactagtattctgcatttctgccgtactgatatggaccatctttctttcagatttatcttctaggaaacaagttatgtttcctggcgaataaaaaagaagtcaagaggcaaaacttctatacaaatagaaagatgcaaggtaatggttatcaagtatcaacatgaaagggccttttccgtatttgtacgagtgagtatgaaaggtctagtttggtcctctaatattagatctaaaatactacacgtgtgtcaatgatcagtgcgtacatgctctgaaaaaagcttgacgaactaatagttacgatatttatcattgaatactgtagacgcactagcagaattttactatttgtcattttgtatcactctttcctatcatgttcctacgagtgcttgaacaatgaaaaattaaagtaaagttatcaagtgccttccattattattgttgaactcacagcattgcagatattaggtggtaggtatctgatggagaggatattttttagtggcctgtcaggtcatcttgttaacaggtttgcccacatcaaaatctaatgttaagtgccccacagcaggtttgcacaaagtagaaattgctagtgctgcgggtccaaccatgaataaacctttcatgtttcaaggtttacatgcatgccacctaaggatccatatcattacagtgattttccattattagccaaaaaagagagatactcttttaccattataagttttggttattttgaatgattcgcattggcagcaaagggacaaatcaaaactataacgtgagaatcattttaattttccataggtaaaactgccttttgaatgcgctcatgtcacacgcacatgggcaatttgttctgtgaaggtctaatatattgctgtcaaaatcgttagagcatgataggtcctgggtgaaatcctatttctgggaaagttggagcaccataaaattgttgactgggaatcccttttctggtttctagatttgcaaaaagcctctagctgtttaccttcagtgtccaccgaccatggagtcacaccctgagtggtgggccaatggttccttgcctttttcacttgcgctcattgtgttttaaggttgctagttttgttgccatggttacggttgctataatgtgtttcttgttcttcaggttttttgtctggttttcccaaataaaccgttcactgcatggtttggcctcattctctccttaaaatgagaaaccttattctttaatataacaccggcaaattcgctttgatctttcgaaaacaaaacttggactaatcgctctacgactcctatgtctcaccatcagcaatttcccagagcagatgctttcaattttgataccgccatcactagaaatgaatctcgatggaatggtctttatagcagccttagaggtagtgctgcagctgtacgttatatggaaatatggccatctacatcatggaggatgagttgagtcgtgatcatgttggaagtgagatagagaaaccaggcattaagcaattgaggttatgagcgtggatcgcttttgtctacgtccacatgcggaagctgtaggtcccactatagagtgtataacgacagattttttgtctaagggatatattcagttctatgtcctgattctttttgcaagtcatgtatggaaggtatctactagatcattcattcaatattgagaatgaaattatttctcatccaattttggatggatggtggactggcaggtctgctggagaggaactatgctgaagcagcggcaaggaaagctgcacctcaaggtgactacctgttcatcccaggcaatgtgtaacaatttaggtgtttctgtgacagcccagagttattttttgtgttcttttttgttctgctgtggttattcatgcaatgtatacgatcttatgatgtgattatcagatgcaccgagtttaagcctttagcttgtttgttttatttgttctcactttcaggactgccatagtcttcagcgcctgattgggggtatgtattttcactcttcaggtgtccataatttttactgctttactgaaaacatcttgtagtgaactccttgttccatgatcttttcattgctcttagttcctgattaggttgtatcataccagaaatatgaagtatgattaattatatatgtttgttccctaatagtcctgggatacttagataatttagagtgctcaaaggtacccttccctaatgtaagccttcagctcaacctattcaccgagacatgtacataatggattcctatactattttaaccatgtgaagcactttcaagctattgattttttttaattgattgctgtcctttcctgtataatgtcataccataattatatggttttcttgttacttccagggttttttttgggttttttttttatttcagtagggataacattaaggtcttgtttggatttaagccaaaacttttttggggtttgctaccaatttttttaaggtttactttttggggtttggtaccaatttttgtttgtgccaaaacttgctaaggtaaaaactggcttcaaaccaaacaagccataacataatttaggcgtgtcattattttggggaacaaaaggcagacagctctctgaatctcagattgcatcagtgccttttttttttctttttaattttcttctcttgagcgcacaagcaggcaggagtgcaggaccgtgtcctctgccagtgacgtggcgcctgcaaattatagctagccagcactaataacagatggatggagtaatgtgtgtgtgtgattatgtgttgcttccaaacaaagtctatactacactagaaacaaaaggtgttgcttccaaaaacagcttttactccttgctatcaggcttgaaaataaattaataatactccctccgtatctacctttatcctaagtcaatttttagaaattcgtgtagtttaacaacatgtaaattgtatattacaaaagtgatggccaaaaatacaaatatttaattaaggataaagctaaaatgactgatcatttaaacggagggagtattagaatggtgtcccaaagccacaagcaacctttttttttaaagactagttgccacctaatcttgtctgatcagttggggtacaacttatttggctagattatgttcgaaatattctactattctagtcctgctgtcacattatgaacctacgactaaactactaactcctatagacgtttcaaaatgttgggtatttgcacatggatcacagaaactctaagaaacagttcatgcactcactcactcatgtacctggagtttgtcccctggattcccttgactttcatgtgtgtgaatttcatgatcatagttttatagcactgtgctggctggggtcatgtttcccatacatatgtgatatgttgaggatgtgtcttttcactgaatcagatagcacttcccaactgtagttcagtttttttattgtctaaggaaaaagatgcatatatagcatgcatgcaagttacttactccaattgcaatttatccatttattggttaaaaaaaaattggattcatgacatgcatgcaagttactctagtcgcaattcagccattttttttatttaaaaacaaatgagaataggatgcatcacatgcatgcaagttactgctagcttatggtcatgatagcaacagaaatctttgaaaagaaacctggacattgacttgcaaagataagaaactttgtgctgaaatgactgcatatttgcatatatgccaaattggcttagtggaagtagttgtattaccagtggagagattgatgctaattctgagataattttacctgtgtgtcgtagccctgaggcagctgggagatgaagttgtgtgcgttggccgccttggcggcggcgaccacctcctccgccgtggcctcctcctttccgaacaggatgttctccctgatgctggtggcgaacagcgccggctcctggctcaccagccccatctgcgctcgcagccactttagccggagcctccggatgtccacgccgtcgaccatcacctcgccggccgacgggtcgtagaaccgctccagcagcgcgatcaccgtcgacttgccggacccgctaccgccgaccagcgccacggtgcgccccgccggcacgcggaggttgaagctgacgaagatggggctctctggccgcgacgggtagcagaactccacgttccggaactccacctcgccggtgacgttggccagctcctcaccggtgtcgctctcggagtcgatcttcggcacccgccggatcacctccaggatcctctccgccgccgagctcgcctccgagaagtacttcacgttggacagccccgaccccagcgctctgcaatcccatgcaaaaggtacgtcaatggcgtctcgccaccgtcaagaattatgaacaatggatcaaagtcaccgttgatgctttttacgcacaggccaccgacgacaatggcggcggagacggcgaagacggtgccgccctggtatccatggtacatgacgaggcggctgccgtaccagacgttgaaggcccagatggcgaaggtgatgccgttgctgccgacggcgatgcccttggcgagcccctgcttgagcccgagccgcgccgactcctcgagcgctgccgagaactgagccatggtggtccgctccgccacgaacgagtacaccgtgcgcgccgacgacacggcctgctcggcgatggcgccggggcgggtgtactgctccctgatccggcgggcgaggccgacgaggatgcggccgtacatgaaccccgggatgatgagcagcaccaccgacggcagcgccaccagcgtcagccgccacagcagcgcgaacccgacggcgtagctgccggcgaacatggcggcgttcatgacgaagttgggcaccttctcgctcagcacgtcctgcaccacgaggctgtcgttggacacgctggtgatcacctccgccgtcgaccccttcttcaggtcgaagtactccacgtcttgccggagcaccgcccgaaggtaccgtgcccgcatccgcgatgcctgccgctccgccgtcctcgcccagcaatacccctctgctcacacacacgacacccctcgccggcggcgtcagctcgccgtcgccgcagcattggcatgcaacaggtaaattgatcataaatgcaagctcacctaggaacgccatcacccaagaggcggcggccaagaagacgaggttcctggcgttctgatgaattcgacatcatttcaaatttcaacggcaaattcaatttcaatttaattcaattcaatcatcatttcagttcaggatcgagctgggcggcgaggagctacaaggtacgtaccacgttgaccttggagctgaactccttgacgatgtcggcgccactgccgaggtcgttgaagatgcggctggtgatgagcagcatcaccggcgtcgagatgccgtcgcccatggcgcccagaagcccaagcaccatcagcgccacgtccgccgcgtccgcgtgcatgaacactgtcatgaacgacgagaacaccggcctcgccttcgccttgccggcgccgccgtcgccgcctcccatggccgtcgtcggcgagttctcagctatagcttggtagctatctagctcaatttgctgtctccaagtgtgacagctagttgtaattgagttggtatagctttggcctcttcttttatttttttcaggccgtttagatggtaacctctctgacttgagagagttagagaggccttgtatatacggagtatatagtactccagtttagttgccatgccagcagttgcatgcactagtaagcaactagtctctcggtttcatattacaactcgttttaactaagtttatagaaaaaacatagtcgtatttttaatacaaaacaaatatattatcaaaatatatttaatgtttggtttaattaattaacattggtgtttttgatgttactaattttttttataaacttagttgaacttaaaataaattggttaagaaaaagttaaagcgacttgtaatatagaacggaggaggtagctattggtcaaggggatgtgcatccatgtttggtaggtagccgtggtggctttggtgtgtcattctctatcttttccacacacacactttaaatttgctggctttttagaagaacaatggtaatgtttcgcttttattttgctcatggtaaaaagattgtgtttcgcttttcgaggggcaaaaattaagtctaattgatgctattgattaataagatcgtgatcgcgaggaggattgagatgtctcgatggacataatagaatcttaggttcaaggaatttacactctttaataaagacttcgcttgcaaagatgtaggccaaatgaaagagacttaagcatgcttgttgatataatactagtttattttgagaattaggatttaatttgatgcactaaacctagagtaaaaaccataagatgacctaaatctgtgccaatatatttctagttggttcataattaatcaacggaatgagtatgcagtttttctcttaaaatgcctataggagttaggtgccatgctacaccacactactgaaactgaattggtgccggttggaaaccggctatagatgtcggatatcctaactgatacccagtagacgacacctttggcttcagtcatcgatcccgccggcatcttttacttacaaaggtgtcggttttgaatacagaaccaacacctatactgtcatataggtgtcagttcttaaattgattggcgtatggacagttttacatgtgacttttacaggtgacagttcgtaaatacaactggcacctataagaagcatatatgtgccatttgtacaccgggcaggacacgggacaagggttataggtgtttgtttgtaagtaaaaccagcacctatatgttagcaagaaaaaaaataaaaatgataggacctaccaatttcacatacatatcacacaataacagaaattcacatcacttcaaacatacaaccacattcacattcaaccaaactatatatattcaattccacatccacaaccctcatcccatccccccccccccaaacccacccacacacacataaaaatttgtaaattcctaagtctaaaaattcgaagtctaaaattcaaactcgtacggttatttgatcattgaaagttgatctgataacgaagtatatcatgccgcctaaaggtcgaccacatatttgattatcttatcacccattcaaatttatcattcttaatccgtcgcctacaaataacaataaaaccatcaattaggagtttgtcttcacggtagatggttttaccatagtactatagcagggcatggcacaaattaattaagataataaaaaaattaatgaccaagcctaaatcgacatgtgctataacattccacgcacacatatattaagcctaacaaatttctccatcaggatctatctattcttcaaccctgtctcaatcagctagaaacaggagtaccatacaaaatgaaaaaactaaacctgattcaacaacagaaattaatgaatcatcagttaactaccaccactctgtataaaaaccaaatttttttaatgcatatgtttaaagactaatcactgctcctaaacaggagacggcaaggttgacttggggatgaaatatgtataggatgtgaatatttttttggaaggcccaaggcctaatgcgtcactagtgacgactgtgctgcgctgtagtgcttggcctcgtttccttggggcgtgaagagaagtaatgcgaggataagaaggtagacgcagctgtacacagacagctgcatgcattctcatctagctagccgctagccgaggcaaattgagatccatgacgctgacctcgccattaaagataatatatatcacggggttcatctcacaattcatctgttgatatgaactaattactttttactaattagcatagctagtcgtctatccgcgcgttgcacgggctattatcatttattcactccgtcccataatataagaggttttgaatttttacttacactgtttgaccactcatcttattaaaaaaaatgtgcaaatataaaaaacgacaagttgtgcttaaaatactttgaataataaagtaagtcaaaaaaataaataataattccaaaattttttgaataaaacgagtggtcaaacaatgcaaacaaaaagtcaaaatcccttatattatgggacggagggagtatattataactattagattttattaaattttaacatatattgagtatgtattgttttattttttttcttaagatatatgtaaagtctattttaaagatctaacggaaaattatttattttatctatagttcaaaaaatcagaatcagtgaacacacaataatatatataattcatcctactaatgattttatctcttcatatttattaaactaataatttgaaaattcagaattaataagtatccatttgtactaatacaatgtaggagtattgatttagcaattttcttaatttcatttagatattcaaaattaataaatacatagttatactcactttatacctataattatattttttccataattgaataggttgacaaattaaagcagcaagttgtaggcatggattattcatgatgtctaccaactccgtcccaaaatacttgtcgttttgagtttttgtctgtaacttttgatcatttgtcttattcaaaaaattatgaaattattatttattttatttgtgacttgctttattattaaaagtactttaagtgtgacttattattttttatatttacactattttttaaaataagacgaatggtcaaatgttgtaagaaaaagatcaaaacgactagttactaatttgggacggaggtagtacgtttcagttctaagtcttcaaagtgttgttttttcttctacaattatgaggatgatagagtttggatttgtaggtcaattcattaatgacggtttacgtacatactttctccatttcacaatgtaagtcattttagcatttctcacattcatattaatgctaatgaatctagatagatatatatgtctagattcattagcatcaatatgaatgtgaaaaatactaaaatgacttacattatgaaacgaagggagtacgatctatcgttaattatatcgctagctaaccgggtctcgtcattatcagattcatcgtttgcacgttgatttaatttatctgtcgcagctaaaaatttaaattgtcaaacttaattttagaattaattttgagatttttttattatagtgtttttcagctttgtctttttagttgttaatgaagaagacaggtagctagaaaagttttatttataaattagtttcggttactttgtttattttttttcacagcttttcacccgtagagcaaacgatggctccataaagctgaaatatgagcctctcgggttatcaaacatgatggcgatgtttgatgataacatcaagtattaattaatggtcacataaaccttaaggttgttactttcacaacgacccgtggatgaccttgaatttccatgagttttttcagaatatgaattgtcatggcacgtgtttgctaccggaatatagtttttagcattgtcgccatttcaatgagcacatagtaattaattaagttacttcagctaaacacacaagtgtactcgttatgtcaattctcgaatcaatcagctgattctgtagaccatatattaggttcaaagatcttagctgccacgtatgcaaggccttaattgaggttgaggcatcaactaatttgatgaacttgctaacatatgctacctctgttttttaacacgcgtcgatcattgattgatttttttcgatacacgtttaaccgtttaccttatttaaaaaaacttatataattatcatttattttatattgagttattttatcgcataatctatatattttgtatttgtacagaagttttaaaagttaacaatccattaaaaaaagttaggaaaaaagttaggaaatgaaggagtacatttcagtatgatattagacccaaaggttttgtttcaatgtcctgctaacagaaattaaataaaaaatacatagtatatttttattcgaaatatatctatggctcgagggtgcctccaacgtgaggtggagagtgttggaagcgcattctagctagatggtagggcgtattagctataacgcttataggtacgaattaaatattatctattataaagctaaaaaatgtttataaaatgttgtccaaacaattaatgttgatgtagaaagttttttttgatcaaaattatattttgagaagtatgccatgcatgattaatcggtatccctttccctagccttcctctttagcttaaccttttgagttgatttgacaggtgtacatatgcaatttaatattattagacaataaatctttaggttaaccaagcactggtagaagactttactatttgggaaacaaagacttattccaagcccttgtcacatcggatgtttggacactaatttggagtattaaacatacactaattacaaaacccattccataaccttggactaatttgcgagacgaatcttttgagtctaattacgtcatgatttgacaatgtgatgctacaataaacttttcataattatggattaattaggcttaaaaaattcgtctcgcagattagctctcatttatgaaattagtttttttattagtctatgtttaatactccaaattagcgtccaaatatccgatgtgatatgaactaaaaagtttcagctccatctaaacaccaggtaatatgaaagtagtagctagctaggcagcactttagagtacacctctatggttaacaaactacaataggtcagatgctacatcttaggagttaatcatgcaattggccaaaagagaggcacacagcagagcattgaaattgcataaagaggtgatagaaagttgaagaatagatcctaccaaattcacaaaagtgcatgttctgtgcagattctccatctccccaagttgggatatttttctatgcagattgaaaaagtggaggaatggaatctcatgctttcctactgctgctactggagcagcacatcaatgacttatctgatctcctcctgtagttcagtgtagtggtgatcactgttcttccattgctgtaaataatattgtaaggattaattggttccatatatatcgtttgcagtacataacctactgatttaagcaaaattaaaggaattggcactgatgctttccctttctttatgttagtacatagtatttttttggtcaattaacatctcataaaagtagggataaattcgcattgctcaactggctttcgttccatgcccacaatatgtcagtcattgtgattctgacacatatggctccaaccctacatgtcttgagaatcaatgctatatcgtagacatatatctgataacatactgtgacttaaaagattgctccggcctaaaaggtactcttattacatttcttagttttgcatagaaaaagcgatgtagttttttccaatattaattgtgagccacaaggcaattaactcggagtttaagggtgatattattcaccgaattattaaaacagattattccctccgcacttttaaaaattatgttttatgaacaaaaatatttttccatatcttttaggctaattgttaaagcctatttgttaaatgtatttgtcaaaatagttattaatttattcgtacaataagtagatagttccgtgcgtaccaataattcacttaataatctaaacaaagagacatgcaccacccctgtcaattacaccaccgttgagacatgtcgcattcagaacatttccatctccattagttaacatgcaatttcgtgtgcagattttttctgccaatattccgtgacgtgggagaagaaagaacctggttgcaacatctcccagcaaaaaggggaatcaagattcaagaatagccacacgaaatggagatcgttattagcagaaggttcaacgattgatgtagcctctcaccttctgcaatgcaagcgtaattattttggccactccgatctcatctctcccacatcaagtaagctggtcaacaagaacaactaattatggcttaattaactatggtcgatagagacctactatctccgtcacaaaatataagaagttttggttggatgtatacatcctaatacgtactatgaatctggacatgcttagattcgtagtactagctagaatgtgtcacaaccaaaacttcctgtattttgggatggagggagtaattgttaaccttctgatatttacatatagtagctctagaattgtggaaggaacagaactccagggtttttgactctgcgctctcttcgatctcagtggttttagagtccatcctttcggaaggctagctgtggtcgttagctggtgttgcttcccttggggatttgtgttgggagtgtagcgcggctctgcccactctcgctgattggagtagcgttacccgtcgtacgagtttttctttttcttccttggtttttgtctttgtttttctcctcttggcataagccggtctggctgattgcattgtgttaggaaaactcttttcttctaatatactgacgtgcaatcctttacgcgttcgcgaaaaaaatacatatagtagaaaataaattgtgtggtaacttaattaactgtggtagtatttgtttgaggttatttatatgcatgtttccctgaaaattgatatagcagtacaacattttagattaaaatcacaatggattaagaaacaggataatgcattgccaaaggttccatgggtactgtacaaaaaggcctcctttgattggtcatccattccttttaggatggagaaaagctagacatgaaccgataattaacctactttttattccccttgctactttgatatgttatctatgtgtaaatcatgacctttgaagtggcgaaagccaaagagatcggctctgatcgatcaaattttgccgtcaatcgggccatacatcgatccttacccatccccgctttgtttcactttgcaacaaaagaattagtgatatatactatgcaaaagttcgtctcaagggaaagtatccctgtttttcgtctcgtccaaaaaaatcatccaagaacttgaagaaatttactgaaatagaacaatatgtgatacatcgctccataagcatatgcaagttcaaattcaactagtaaaaacaagaaaataattgatttcgaatagaccgtataattcacaatatttttttatttttgtttctagttatatatgtgtaatttcaatttgcatgtttgtggaggtggcatcaaatattgatttattacctgccttgcttagtttttttttataatttttacttcctccgtacccgtaaaggaagtcgttttggacagtggcacggtcttcaaaacataactttgacttcttatttctataaaaatatttattgaaaagtgatatatgtatactattataaaagtatttttcaaaacaaatctattcatataatttttacattttcaaactcaacaacttgagagttatttatgatttatattctcaaggtttgacttaaacattgtcctaaacaatttcctttacgagtacgaagggagtatgactttctagatgaaatgcgctaaacaaggagacgttcttcgcatgcttggccttgcaaccttcatcagcttgcattgtacatacatgttagataaatgcatgcactcctttttttttcttttattataacgaaatgtgcataaacataaacatctgctagtacacgtactacgtatagattgctgacatgcctcttaacacacacttgtgcagttaggacactaagtagtacgtactatatgtactatcatttatcggccgttcgttcttcacattggttgcgaccttgcaacatatgcagcgatcgtacatggaagataaacccattcatttcgtctttttcttaattttattgtacggaaatgaacatagacatacatgtacttgctgatatagtacactaagagcatgcccccttaacacacgcttaatagatagagacgagagaaaaaatataataactttctctatatattgatgaagtgtgcatatatgaatgctttgcgagaatttgaatccttattggtggggtcatccagaaacaatacctaaatgcatatatatttatatttatagtaaaaatgtaaatataatgcaatcaaaatttgcttttattttagggatgatcatgaggtcgcttctttttatttggttcacttttatgtggttttcccctttgtcttgacaaagatattaggtgcatgtcgattctaccctcctttattatatgataatgaaaagctaatcaagtacatatgtacatgctgtcctgcctttcttcaaccatacaaatcaaaccatcaacgatcactagcgtgcatgaattgatatatagaagacaattaattaattaattaattaattaattaattaattaaaaagacatgtttttcatccctcaattctggactcggtttgtgttatattcaaattcgatggcaaggggctaaaacaagcctaaacaacttgagcttgaaccttgtaatctaattaaaatcacaatagataaaaaaatagatttgatctaattaaaatggctatccctataccttgtaatatatttgatctaactccgcccttgccggtggctagctactatctggttaatttagaacatagacgccacattattatgatgtggttattctcatggaaaagggcatagaatccattcctgatgcaagaagataaataaaatatgctatgcattattctaagaggatagaagcaattaatcacaggaacatatgcatgcatctttctcaagaaaatacaaggtacaaatttattaatgatggttccctcgaaaaaaaatatatattgatgatgtaattgacatctggtggctgatgcatgcatctatcccattatattagctagctagatgacagctagtgaacttgttcttccacttaaaaaaaaacagtgaacttgttctagaagcagaaactttaatatttgttgctctaaacacaagagtttgtagtactatgagattataaaactaaatcttgtttaaattacttagaaaaatcgattagtagtcagggagtactgcatgtgtttctctagtggtagcagtttgaatgctaaatgtggcaaattggcaacattattagttgtgctcttgattacttctagctaccctaaatgatctgattgaggtattttagaaatgctttaatttgcatgcatgcctaatatctacaagacattcacaaccacaaatttcattagtctcgtatacataacattttcaaactgataacataaagaaaggccttgctcgtgtcatccctgattaagttcaaattaattaatggttaggagggacaagtgccagcagattaacggtgtcgctttttaaatgaaaatttatctctaatactccctccatctacttttgatagtcatatttcatcttggcacacagactaatgataagtaattctacttatcatccatttaaacatgctactagtcattcctcgtaaacaagcgattcattaatatttacatttcatgatgctcaagtagccaatcttgtgtggaagaatggagagtcatgcattaaatccgagaaagtcattaagatgataggttgttgaattgaaatatgcctatcaaaaatagaattttcagatttggaaatatgactatcaaaaatagatggagggagtataatactagccaaggttattatatcaccaaattaagtcttcagtacacattaacatggcgactccgttccgtgattaattaaagggagccagctgctgctatagcatgcacaactgtatgattgagctagctagcttctagaagctcacaaatattttagaagagaaataatgacaggataaaataactcctactggctaaattctaaaattaggagggtcaagcttctttcgtgtacacagatttgctgccgcaaacatgtgcaaattatcggatcaagagttgacgatgtataattaattaattaatttaatttaacacgataaaaaagtggaggtggctgtatattagtagatgccaatgacagcctcgctttattatcatgatttttgctcgtacagctctacaatttttccttgaaaaatgtggttttttttaagaaacacggaacaaacataaacactcacacacacgcacactcacttctataaatgtatacaccatatacacctccgagtcatagatagtaatattaacgggggaatgtatatacaatgtgtgttgtccatttcttaaaaaaatattaatgttttctttaaatttaggtggtttttttatatctgaattatgacaaactcggataattataacgaaatacaactgctaggaacatcttacgacaacgatagttacacaaacattaaaaacattgaagttaaacttttcgtgatttatatgcatatatgaggaaggagtgttattattccaaaactatggcctggaaattaagaagtgtcccgttgacatttgtgatcagtataatatatatgcaagctagcaaatataaataataccacctatacaataccaaattaaagtatgtatcatgaaatgtgtagtggagaggcttggactgtcaccattcatgtacattgcatagactctggtctcaatgtcatgtatgacaagttatagtttagtctcatccacatgggggatgaaaaaaaaactcaagaaacattattttggtttcttaatcactaccaatatttttttcccttcatatatagaaatcgtatccttttattgttccatattctaaacaaactcaaggacatctctagatcgatgtctcaatgatatatatatatatatatatatatatatatatatatatatatatatatatgtagtaaatttgtttggtgctccatggtgcccgggcaccattgttgaaattgagtatatacccaattcaaatgagtatgaaactttttcaattacttaggtattaacattaacattgttgaaattgagtatatatatatatatatatatatatatatatatatatccatggttgatgcctcactagtagtatatagtatagtaacccctttggtgacatgtctagctagactagtatagactagagtgactgtactgcgcatgagattgtgaatgcatggctcggtagatttgccattggctttgcactactagagctagtacaccatgcatgacaacgatgtgccgacatacccttttgtaaataaaaaatattcattaccaagtagtccctccatcccaaaatttattttgggacgactccttccatcataaaaagaattatctagattcatcccaaagaagttagtactatctataattataatagaagaatcaatctaaaacatttatctttaatttctaacatgatggatcttatctatttatatagccaccacaactactgatagtagaatattttttcctactagtaataaaactcataaataaacagttatgatcacttatgccggcgataattaataccataggtagtagaatatataccatcagtaaataccatcgtaaatgtatttttaaggaaaatctctaattgttttttaacagtgttagatacaaccaagaagattattcattgattttggcagtctatatgtattgtaccagcatataatgtaaaagttgtagttttatgataatttcctactctgtcgttgcagcaaactgatagttttgtcactaaagttatagttttctgaaacttactcaatataaaacaattaattttttcaccgttaaataaatcagttggccgccaaaaaaaaattctggattctggtagcgagtcatgttgtgtcgttggtcgatattggagtttctgcagtggtgactacgttcctctgacattacgtctctatatatagcaaacccctgcaatcctgcatctgcattcatatatgctgctatcatacatgaggtatatattttgaggcgacgctgacggctcaggtggagacaagagagccgcaaagggtatctaacgatatatcgatggaagagagaaccgatgacgaagaaagattcatgcaattagctccaattatgccgatgatcgatgcaggcacgacatatttgaccactggcgcgtacagtagcatatatatcctccatccgtcataaaatatagctatttatttataattttttttctaaattatactggttatttttcttaattatcttaactaattacaactatccctgatttaattcctctatgtattttaatttctcgcccttaacaaatcccatagtctttgtcacttaattccacctactttcataatacctacgaaaattaacctttagaaatactccctccatttcgtatttgttatttttgattaagttatagaaaaaattagcaacatataaaacatcaaaattaaatctaatatataatatattttgtttattctgtgttgaatatattactgtgtttttataaaaaaacttggtcgatcgaaccgatagaaatctgactagagaaaaatacaactgataatatgaaccggaaggaatagtatttaagataaaacggacaaagtatctactatctctataattagtaccattattctatctctcccatctatctgaatctgtcgatagaggtgacggatcaatgagagaaccggccggtgcgatgaatcatgcaatgcatggtgccatctgcccatggtggtgcggccaccaccatctcgagagagagagaaagaaagatggactggaattgatcaagaaaggagaggggtagctgcatgctgtacgcgaccgcaaagcagtgacgcgcactcactccatcgatcgccaaactttgagcaagtttaatactcctataggtaactatggattattgattattactcctctctttcagtttcaggttataagactttataacattatccacatctatcttctattatatactaaaagtccattaaacttcctacagacgctctcaatccgccatgtgtcactcctacaaacacttctagaccaccacatgccactatataatctcatcgtcgattttcacttaaattaatggacccaatattttagaccattagattagatctattatttaagaaagtaatcccttcctctgctgtgagccagaaaaagaaaaaaaaacgtacgtacgtacgtaagtgtggcttcgtataaccgtgggccggaaaaagaaaaaaaacataagaacgtagtacgctctcctgtctcttcctcttcctattcttttatatctccatctttttctcttcgtaattcttttatgttatcaaattaaaaacgagttaagttgaccataatttaaatgtacatagctaatttatattctattaaaacgttgttctatttataattaaattgacaattttacatcgaatgttttgctatatataagcaatatgttattgtggtatagactgtgtatttttttgcaagtttacatgtcatctaaataaattaaatacttattaacaacatatattatatatctatctatctattattatatagtaaaagtccattaaactttctataaacactcttaagttgccacgtgagactcctataaacactcctaagccatcacagggcactctaataaattagaaaaaatatataacttgaactggtgggccaattggatttatctcataaaaaaaatcctttctcaactactacagcacgttctcatctccttcccctcaatcccttctcctcatctctttcctttttctgtatggtagttaagatttttgtttcattacttaataattaatttcttcacttctatctcacgagaatggatgtggactcttgattgcatgtcccatgcctaaatatatatataaatgattaatgatttgatgcatgcttttataaataacaaatctatttttaactaacaatttagaaaaaatataatagttacatagaaaaataatcataattttaaaaagttactccctctatatcatattataagccattttaacttttttcttaattaaatttctttagatttgaccaaatatataaaaaaaattaacaacatctatcacacaaaattgttttgttagatataacgttccatatatatccataatatgtttttttgaaaattttactatattttctataaacctggccaaacttaaaaattgacttaaaaaagtcaaaatgacttataatatgaaatggaggtagtatatatgtttttatttagtttgtttgaatggttgtttcataattagacagctaaataatttaaaatcaatattaccaatatttcactataaaaaataaaatatgttatttgaactgccacctattctttacctgacaacccaaataacatcctatttttaatttatttgaactgttgatttatgttactcatattttactatgtaaaatttaaaatacgtaatttgaacatagaccaacaagcaaacaacactgaaacgttgaaaatttgacaatatgtattatgtcatcttaatcattctacataataaaaattagaaaaatacaaagtcaccatgtatgaccttttagagacatgttaaattaccaggtgtcacattttaaaaattagtaaaatcttatatattaaaagaaaaaaataaaacttctagctaacggttttcacctagatcgatgacctattaacattattttcaactatctaatctacttttagaaaaatatatcttaataagtggcatgtcacatattttaaaaaaatcttgcaaatcttaggaaaattacatctaataattggctttcacttaatcacttagaaaaattacaaaaaaaaaaaatcccctccacatgcgcccatcactacacagccactccttcccctctctggctcaagctctaaacttttcattcctcttacgttcctatttaactaaaatataaataatctataattataagtttcacgtctaatttctaatctaactattgctctgtttataatcaaaccaacgatataagatccatatgcctatagtttactatataacaaatacgacattttaacacaatcagcctattacttacgagtatctcaaatgcagcttacgatacatgcccgcgtgaatgtgcgggctaccttcctagttcatataaatgttaatgaatctagtcacatatatatatatatatatatatatattcattaacatatatattaatgtgggcaatgctagaaagtcttataatgtgaaacggaggaagcaagttatattaaaattaatatgtataatagattaactgctagctccctatgtcccataatataagggattttgaaggatgtgatacattatcctagtaccaagtccagatttataatagacatgtcacatcttccaaaattcattacgttacgagatggggagtgtataggggttagctatattttttctctcatctttctttctctatcgctataaatttaacgtaaatatataacttgaaacatgtatataactagctcatgaggtaatacttattgtttttctttacctttattttccacgtaattaacgtaagtttatagttgtgctagctctggccggttgcctgcccgtccggcctttctcgtcggcttaattagcttgtcgctgctgaaatattcgccatcgtgctagctcgccgaactctcgtacgagagcgatcaacaggcggcttgcttaatatcgcatgcatttgcgtagttaattagttttgcatgaatatctaaatatcattttttctttcactcccccgatcagattttattaagattaattacgagggagacgtactgttgcatattactccaacaaatatggttattgtgataacccaatacttacttttgccggcaaattaaacgactaactacccggcacaataaccaaaggtaattgctacctccatttttttaatatatgacgtcatggatttttttaacagacgtttgatcattcatcttatttaaaatttttatacaaatataaaacgttttaagttatgtttaaagaacatttgatgataaatcaagtcacaataaaataaataataattatataactttttcaataaaacaaatgtccaatgtatttaaaaaatcaacaattttaaaaaggagggagtaataacctaggtcctactccctctatcccaaaaaaatgaaactagtattggatgtaatatattttaggacaacaaatctagatagatgtatatttagattcatagtattaagatatgttacatccaatactagattggttttattatgtacggagatagtatatatatcttatatcgtgatgtctccaagaccagcggcacatcatgagcactctcatcttttttttttttttttggaaacacactagaagacgtcaatggcagttttagtgatacccttgacctggcatttttatccttacaaaccatccaagtaatcaagatcactcctgcatcaaaaactttccggaaatattttcttttatggcagcccaagaaagtgccaccaaacttccatattaattggatcactaaacgtctactgtgtactcatatgattataaattaagcatcgttaggctgcgttgggctgcagcataaagagagaaaaaaaattccacatgttccacgccacgcttctcaatttgctaaacggtgtactttttataaaaattttatatacaaaagttactttaaaatttcatattaatccatttttcaaatttgaaataattaatatttaattaatcatacgctaacggcttatcgcgttttacctatcttctcagccttccatgctccggatcccttcggcccttcctcccaagcatacccttaggaaggacatgcgcccaaagtgatgaaaaatgatttcatggtaagactttcacatttgtacttttagtggtatgagaatacgatggcagcaacgaagaaacccctctagattaattctaaaagttcaaacttctctgactttgtggaaaatcagtttgtatgagtaaagggcattcttcaacagaattctccaaaaaaactaagagtttgttaactggggcggcatgggtccaagaacgatttgtgatcaaaacaaaaccttggaggacccaattcaagcccactaatttctccccgttttttcaaggttaagccaagacaagcaatccatgacggcccatgaaatggaaagctggaaattaatggacagattcttctgcatatatgcaaataaactcctttcctcttctctctttaacttattttaggttgtgcatttcacatgcactcatcacttcagcagtagtggggtatgcaaatgcaacactgctgccacactgcattgtccttctgttattactttggtgtccttatgttcttattacttcaaagagagagcagaatgtcggttgacatgtaacatgaggcttctctgattaacagtgttgtttattacacaagagacaatcttctgcatgcctgcatcacaaattcacaataatttcagaggaagtggtattatcccttttctggattagtctattttatacccccgaactttcccctaagcctaaatatgatcgcccaaactttaaaaccggacattccttctcacaatgacgtttgtttcattgaatctggtgtctcggatactcttggggagattgccatccatccctgtacaaattgaccaaatggcagggcactgaacaagtgaacagtgtgacaaaccaacagttgcacacaccatgttcagagcaatccacaatgttacaaaaaacaccaaggtgtcagggtgatctgatcattgcatcaggttttacaagaagggaccagaccagcatttcgcaattgaatcccagttgcatgatgcattttgtctgagtgcctgactggatccactcaccacagttaaccatcattttctctcatcatgggagatccagtttttttttaactcacatctggactgaacagggattcagaataattacctgaatgaacctgctgttccaactataggtaggtgaagatgagcagatagatgcatgagctgctattacatcatcatcctctatttccttttattggatcaagacagccaatgatttgggggttaagtagtactccgtattttttaggtgagcaagctagatgtaactgaaatgaaatcattcattcatccatgcagatggccaaacaaagcagaaaaatgtcaatcatggaggctgcaacagcttgaagagttggacagtccagtctggactgggcagtggacaaagcagaaggtttcaggagctgaaggacaaaatgctgataaataatttaggctgtaaatctgcaggatctcacaggccatagggccaacaaatcggctgcattgtaaccttgtcacatgccatgcatggtttggttaattgcttcaggattcaggtttcagatgtgagtagaatggttagttttcttgcaatttcaggttcagaaaatcggcaggaattggactgcggctaaggttccccctgtggtggtattggttttactaccacccaaggtaagcggtaactgtgccgttaacacaaaaaaaaaaagggcacaaaaattcatctttaactttttgaatacaaaattttcaaactccctcaatcggtcgcagtagccggtaaccgcaggtaagtggtggtaaccatgatatattattcagtggactgaaaaatgcaaaaaaaaaagtaggacaaattctggaaaattataggtatctatagaaaaatataggtaaaattcagaaaatgtaaaagaatataagaatcatgtagagacctgtggtatattatagacatttttgaaacaaggtaggaactgcacgttttccctcaagtgggcctaaagggctccatgtatagtgttcactgtggacctagcctatttttcctattttagttttagttttggtttagcggcaaaatatgatgttaacttcgtttttttcacaaattctttttcaccaaatagcaagagaaattagatactacttataggattttttttattttttttctaaatttaaatttgcccaaatttcatcaaaccctactagcattatcatgttctcttgttccatctctgtgattttagattgatttcacatattaataacggtctttgcaagtctcccctaacattctacacatacctaacagctgaacacaatcttgtttttttcagcttctttcttggaaagaagatgacaagacacaacaagactaccaggaccaaaagccacaatttcagacactgatcatcctgccacatcttaagtacagttagatgaacacagaactgatgccatctagagcaattatttttttcagctcaccacatgcatgggcagaatagtaatatagtacgtaaccatgttcataattgcatagttaagtacaatgcaacattcatatggattgaaataaataaaataaaataacaaagactaaccctgtactggttagttgcaaacgggcggctcaattaatcaaatggttggtcaaaatagtcagaacccaacttgcaagcaaccggcatgatctaccaaacacatttagcaggagacaaatgtttcaagatgtacatcaatctcagccgaagactagctaggctgatttagcatagtactgtactgtaagtgtttgccatgactctagcacatcctaagctcatgtaatgtaccaaaatttcttaacatgcaaatcataaacttctagtcaaaatttaacaagcttggcatgatagcattcgtttctactagatatgaagatgaagttaaggaaaaaaatcaaaaaaaactattagataataatggagttttaattattacagacttgaaatatctcatattctaaagtaaaattttaacgggctaacgaaaactgaagtaaaatatatatgttaatcagaaaataacaggcatagtatctgatgtgatggagcagacaaaaataataatgatagagcatgtgttaaaggagagagttctataacacctgaagtaagtgttaagaaatgcacatgttctaagttgctttgacaagtatgttctgaactatataatactcatcataatattagttgctcatattgtgataaaatttacattacgctaaactactacatttatactattttggtatagtagtcactatttcttccatcccaaaatatagcaacttttgcttggatggatgggatgtatcctaatactatgaatttaaacagaaggactagatacgtcccatccaactaaaaattactatattttaagacgaagagagtacataatataacttaaaacattcaaaatcttgatcacggatcgatacatatacataaaaaatatatgcatgccatgacaaaatcaataatgacccaaattttcattgagaatacttttacaccatgaatatattgttaatatcttttttttacatatgattcaagatctactattttctggtaaaatgagtgcattgaagaccatgccaacatctgctgtagtagtacatgattacatttctgtaaacacttgctgtgtgaaactgttgcaatacaggtcaccaactaactgcatccaacaacaaaagtaagtagcatagctggattcagagagagttggaaactggcaagaaaaaagcaagcttttttttggctgtggggaacataggaggaaggaggaggaacatggttcacagtcccaacagatcaaaaaccactcatgaggaatgcctttgggttttattgaaactatttgttaaaccgataaataccgataaaatttaaataaatcttataaaaaataaaactcgatttaatcattttaactttatcaaaactaaatactctagtttatattttcggcccggtttgaaaaatccagaacgatttttatgggttctataaaccctgaggaggaatcacttgagtgaagagccacattttgagtcaaacacaacacaaacacaagaatcattatactactaaggctgtgtttagatccaaagtttggatctttggatccgtccttttccatcacatcaacatgttatacacacacaatttttcagtcacatcatctctaattttaaccaaaatacaaactttgtgttgaactaaacacagcctaatatacaacattttttcccactccattagcaaagcataggatcagctttgcttccttccttccttcctcctacctcacctttcacctgctccccacatttattaatcgaatcaaaaagctcatccctttcttcctcccattgatgagaggcagaagccaagaacaaacagcaccctaaaaaagaagcctatcaaagaatttaaggccgcggagaaagatattgaattctttacccacactcgccgcatccaaatctcctcctggaggaagcaatccggtgttctctccttttcctcctctttatcttactagtagtagctgttttgctccctgcacattagctgtccattggcagcggcggcggccatggcgatccgcgtggccgtttcctagccaagaaggcaagaagcaaccgagaaaggcctacaaagtttgcgttcttgagagaaagagggtggaagctagtaggtgttagtgggagggaggggccaagaatggcggcgctggccgccgcattggttgggtttcttcttgctgtctcgtcggcgccggcgggagccaccaccgacgcctccgacggtgagctgcggcccacgattcatggggttcttggttttcttggaatgttcaggaaatcttgttttctttttcctttgatggttggggtgttgttgcagctgcggcgcttgggaatctgtattcgtcgtggaacagcccgtcgcagctggctgggtggtcggccggcggcggcggcgacccttgcggcgcggggtggcaggggatctcctgctccggcgctggcgtcaccgaaatgtaaagatcccgtgatgcgacagcgaagctttcattggcttttttttattggatttgatgagttctttcattggctggtgtttgattcttactgcattctaaatttctgactctctgcaagctgaataaaaacaaatgtgcatttgggaatcgaatcacaatatcacattgtgcaccatcttcattgatggcagatagtttaggattgccaaaatcttctaacaggattaatgaaaagaggggaattaaactccttttttggatccatctatggaatgtgactacatcgcactaaccaacttcactacattcatggcagttctgttttcattggtgtctcaactcctcttaccaagtttgttggaaattcagtgggaaaaaaacttcattttggaacatacatcatcttttgtttagttttatttacttttgttactataagaagctactcaacactgacttgctctcgtattcttcttccattgtatagtaggcttgctggggtaggactggatggctctctgggatatgaactctccagtctattctcattgaagacattgtgagagctcaaaacttggttatactcttcatttttttttatgcattgttttgatctcccgtttcgttacttgcagagatttgagcaacaacaacttgcatggttcaattccttaccagctgccaccgaatctcacatatctgtatgtaatgtaccccacctattataatctgttacgcagcaataagtatagggtgttttattctaaatgatgacacaggaatctggcaaccaacaacttatctggcaaccttccgtactctatatccaacatggtttcattagagtacctgtaagcttctgtccatcactactttgctgtcttttgtatcaacaagtattaatgtaacatcgttaatgcagcaatgtcagccacaactcactgtctcaacagataggtgatttatttggaagtctcaattcactttcagagctgtaagtcatcttatttagattttgtgtgattacacagtgtttctatttacggtcaagagacattcttctgcaacatggcatatatcttttggcaacaattcaattcaaattttattcttaaaatggcctcatataaacttccataaaatgcctttttgcttcatggtccatagcagaagttagtcctaagaggtagaaattcagtagcagttctgtttgtagtgattaaatccaggcatgccatcttcttgtccattttggttcttgtcattttattattccataacattgatgcccatacaataaatgctttgagtatttccctccaattcgttagtactgttacgtgacctttattattattttgagacttgattcttggtagtagtaccaggggacactatcaaccacctagtgcaaagctaagcaacccttccaacagttgagtatgaacttagaaatcttctattatatactaaaagtccattaaacttcctataaacgctctcaagccgccacgtcgtctcctacaaacgctcctaaaccgccatatggcattttaatttaataaaaaaatcaaataaatatctaaccattgattttcctttaaatcggtggacccattaattttaaccattagatctacatctaaaaggaaaaaggaaaaaagtggtatccccacctccattgcgtacgtacgtgctccctcccaccctcctactctccccttctctcctatcttttagctaatttatcctattttctaactaacactccatatattaaaaaataatttggacatctaaatgatcataactctcaagttacatatttttcttttttcttttcaattgttgagttatttataattaaatacataattcaaaattcatattgctcatattttattatttaaaatttagatcatgtgaccgttctaactatgtggtatgcctataaatgctcttaagtcattataaggaactctaataaattaaaaattcaataaatatgtgcaataaaacatctaactatcgatttccacttaaattgatggacccactatcttatatggttagatctatcttttaaaaaaatcgcaaaccaaccttcttccctcacccatcctcctatttctctctccttgccattccttctttgtttttttcactccacgcaatgactaaaataaaaattatctttacccaaaaaaatctcaaaaatggacctctacctaacacatgtagctggctctccctctatcacatgattttcttctctttctcctctatctagcacttatagaagcagcataaattggactttaaaataatcataatttcttaaattatatataatttacaatatgtataaactactgtaatttttaattaaatcaataatataatatgcgtattgacttaccttgtggaacatatccaccttgaggcctccactaaataaaataaaataaaaatttctcattagaaattcaaatatcccaccttattttttttaataaaccagtaaacctattatttattataccctgctagacatctaatgtctttctaccgactacttccgttttgaatatattataaaaaacaaatatattataaaaaacatattcaattttaaatttactaaaagtaatttggtgttgtaattattgatatatttttccaaaaaagaggaagtaattaatttctcttaataggcaaataggggctatttacttgtacttgattttagatgcgcttttgtgaataaattatcttatacgagataaataaatgttcctaggatgatcatagcatataaattatacatatgatatatggtgtcactaatagattagagaaaaagcttttgattatatcatttttttagtcgtaacgtgtaccccgtgtagggtctatttgtcatatatagataacagattgaaaataaccaacatggtgcgttgagcatcatataagatcgtagcaagcacatggtttgtgccaaggaattatagcagtgaaacaaccatatatatcaaatcaattctatatggaaattaaagaccatgtatatttatatatttatttatttggtaaatccagaaacactccagtttagtggtaccattacttaattcttaattggagagagaaatttagaaaggatgccattaccccatgccaagttgtaccaccttaacccatttatattttcattccaaattgcagagatcaaaacatttaagagatacttgacggaatggaaatctagaaaaaaaaattaaaataacatgaaataaaattgaaaactgaacatttatttttttctaaatctaacatttttttcgaatttgaaacccattctaaatagcaaagtcatatatgtcatttatgaatattttttaaggatattaacatatatagtatacaagaaaaatgttactctgcaaaaataaaatatactaaatattaaaaaagaaatgcattgtgtacaaatgatattatagtttcataggaaacaatttcactgtgacacaatagtttcttataaatttaaaactacaatggttttaagtaattttagtttagaattcatatactacagtggtaattagaaaaagaaatactagcactcaaagaaaccccaagcaaattattcaaaaaacatgtttataatagagtaatcgtaaaaattcgtaataaaatttcaaacacattaaataagatgcccgcgcatgtgtgcgggctaccttcctagttacaatgaatgttgtaaaacttgctgttatgttttgacatgcagttataccctttgcacgtttatggtaataagatttaccttctactccctccgtttcacaatgtaagactttctagcattgcccacattcatatagaagctaatgaataatatctagattcattagcatctatatgaatgtgggcaatgctagaaagtcttacattgtgaaacggaggaagtactttatactaacacacatgctcttcccttggtctcatgaattcatctgatactgtttacattccttggcagagatgtatctttcaacaaattgacaggggatcttcccaattctcttggctctctttcaaatctttctagtctgtgagtatcttgtaattttcatgtaaaccccaatttaaacattttttaaaaactttctaatgcttgatataaaattctccattttgcagttatatgcaaaacaatcaattaacaggttctgtcaatgttctcagtggtctaagcctcacaacactgtaagcgagtttttcagacaacaaattgactgctatgctgcttgcttaataactgagatttccttctcttcaaacagaaatattgcaaacaacaatttcaatggctggataccacaagaattcagttcaatcccagatctgacgtatgagatacttttactgccctttctctttggaaatcatctttgacacactctaatgacctgttgcaattacaaccatagacttggaggaaactcattcacaaatggacctgctccaccaccaccaccttttatgccaccaccccctagaagaccacgtaatcggcccagccatcctcggggaagtggagatgctccagaaggctcagtaagcccagctggtcaaggtgacaagaagcaaggtcttcagacaggcccgcttgtcgggatagttgctggctcaacagttggtgccttatgtgcacttcttcttttggtattctgcattcgcaatgctcagaaaagaaaggatgataccagcagcaattcaaaagattttgtaggtccactatcagtaaacatagagagaggtattacacttgttcatatgctgtcatgatttcttattgcaatatttttcttatctttaataatatataatttcagttagctgagacaatccttagttgaaaggataaccatatgctttccctataaaataagatatccttgaattttggttgatctataaaatgataaatcatgtatatttgagaccccacttttagtatatttcaagtcaggcatttgcatgagaccagcttagtttgtcaatttagttaggggcagctaaaactcgaagtcttggatcatatgtacttgatagatctatatggaattctgatgattttacctttgctctgaaaatacaatcaaaactaagaactgttttacatcattaacttacagcgtgtaacggaatgcacttgtgttgctcataatacatatttccacccttctcttctgtagcttctaacagggaaatcccagagcagagtcctgagaatacttctgtagcaactatgaagatctcacctgctgagaaaatgactccagagaggatttatggtaaaactggttctatgagaaagacaaaggtcccaatcactgcaacgccttatactgttgcttccctccaagttgccactaatagcttctgtcaagattcccttctaggagagggctcacttggtcgtgtttacaaggccgatttccccaatggaaaggtaaaatatgcatcttatattaaatgaatgttgcatgaagtggaatgtaaaccataaccttataatttagtcagtggatgaatcagctgtgcaacactgttatacatacagccaaaccccgatggtttttagcctgtttactcctataggcagtaaaactaaaaatatttgaaattttttcaccctcttattatttttgtgtcatgctatgcactgcgactgagttgcgtgctgtgattgcaggttcttgcagttaagaagatagatagttcagccctttccttgcaggaagaagacaattttcttgaggctgtatcgagcatgtcacggctaaggcatccaaacattgtgccacttacagggtattgtgttgagcatgggcaaaggcttcttgtttatgagtacattggaaatggaacactgcatgatgtgctgcactactctgatgagttgagcaggaagcttacatggaacatccgtgtaagggtagccctagggactgctcgggcgctagagtaagttttatgaatcatacatcattttttgttcaccttttctgatgttttacagcagcaggggcacttctaacgtctttcaaaccttctcccaggtacctgcatgaggtgtgcttgccatctgttgtgcatagaaactttaagtcctcaaacatcctactcgatgaagagcataatccacatttatctgactgtgggcttgccgccttgacacccaacacggagagacaggtcagtcataccaccacatttctaaacttctggttgctaaagttctcagatggccttgtttggctcctgtagaagtagttaattaatggactgaatatgcttggtttgccattccaggtttcaactgaggtgtttggctcatttggatacagtgccccggagtttgccatgtcaggaatttataccgtaaagagtgatgtgtacagttttggagttgtgatgttagagctattgacagggcggaaaccactagacaggtatgcttctagtttatattcaaatcccggtgcattgcgttttataaattgaaaatgaccttctgatggatattgcagttctagagagagatcagaacaatctcttgttcgatgggctactccacagcttcatgatatcgatgcgcttgctaagatggtggatccagcattaaatggaatgtaccctgctaaatcgctctcccgttttgcggacataatcgcgctgtgtgttcaggtatgttcatgcgtttgcattgtgatagatctttagacattgatataggtacatagtaatcagtgagcacacatggagaccttcatgaaatccaaaatggaatgtaacataagctttcttgctgagtttggtaggattcttgtagtctgacaccgaccacattgttagtatctggatgttgggcatcttagtttgatttcttgtaatatcctctgccaggagcatattctaagaacatcttttgtgatttttttttttttttgcgcagcctgagcccgagtttcgccctcctatgtctgaggtagttcagcaacttgttcgcctgatgcaaagggccagcatagtgaggcgacaatctggagaagaattgggatattcatacagagcccctgaacgcgaaggcgacatgagagacctttccttctgagaagttccttccatggtacaaggcgaaaaaaaacagtttggaggctcagttacaagaactttggactactcatatgatgaagatgaactggtgaacgcgagttgatcacacgattcatggtcgaacggatttgagaagataattttggtacttcattgttcaaattttgttcattcttctccccctttctttttttcattttttgtttcccagtcattgttcttcaggcctaaatcaatggcatatgtatagcatgttggtcactgattcacaggtagagaaaaagatggaaaagagatttaaccttgagctcatgctcaactgtgttaattcataccaagtgttattaatgatgattgcttcaaagctcttacaccttactactacaaccacatatgaattcttgtgtagcttcacttcatactactacatgtgttattgattgttctgtgctactccctccgggctgataatattattcgttttggacaagggtaaagtcaaaggggctgttcactttgatgccaaaataaaccttaccaaattttggcaatactaaaattttggcaatgttggcaatattaccaaattttggtaggattttttatgtgtgtactaaaatttagcaacaaactaaatgtaggcactcttttggctactttgtcaaaaaaaaatggtatggtagaaaatgacgtcaaagtgaacagcctcaaactttaaaatctttgactacaaataatttctaaaatatttatcttaaaaatataaaaaccatatgtgtagattagtcctaaaaagtacttcaataaaatcatatatttgttgatatttctatatatattataatagaaaatagttgccaaaattactttttggagaccgtgcccttatccaaaagggcaagtattatcaatccagaggaagtatgtaggtgaaaattttaccatatgtctggggaaatattgatctgtgtgtttgacatcatgacatttatacagtacattgagaggcacatcatcatacctcaaatatgaactatacagctcaaattttgtaatcaccaggcttaaaaaagagtgtgttttgcagcagcaattgttactcaactcacacacttcatctcctggatggattgtctcctagcttgctgctgctaatggtgttctcatctttgcaaatcttggatacattcagcagcagcagcagcagcagcagcagcaaaattcagtgatccaaatgcagatcttgagatgagagatgatgcagatcctcacctcacctatctctgtcctggatgaggttgccgatcatcttggcgagaggggcggtgcccttggccatgatctcgaggcgcgacgtgttggaggccttggcgaagagggagaggccgaacatggcgagctccggcaagaagagcctcgacgacaggaagccgtgccagtagcgcggctccaggtcgaagaaggcgtcgaagaatcgccgcgtgccgtcgaggtcgagcttgaggaggatgtccatgccgaagcagaagaactccctctgcctcctcctctgcgccggccacagctccctccacacctccgccgacagcgcgtcgccggcgaacgcgctgtcgccgctgccggtgtcgaggaagcgcacgatggcgtccgccacgatgggcgcagtggcgagggtgcgcgccaccatgtagcccgtggacgggtgcaccatcccggcggtgccgccgatgccgacgacccgctgcgggagcaccgggagcgggccgcccatggggatgacgcaccgctcgtcctcctccacggcgcggacgcgtatcccgaggtggcgcagcctcgccgccatgcgctcctggatgtcgtccatggcgaggcccgggcgcgccacgagggaggtctcctcgaggaagatcctcgtcggggagaagggcatggcgtagaggaacgtcgggatgcggcggttgcgctccctgatctcggacccctcggggaggtgcgcgtcgcgccagtccatgaacagcatcttgtcgatgtcgaacgggtgtccgtccacctcggcgaggatgccataggcgacctggtaccccgggtcgtacggcttgtcgtactggacgaggcaccgggagaaccccgtggcgtcgagcacgacggtggccgggacggcgacgccgtcgtcgcagatgaggagggaggatgcctcgccgtggacggccttgacgaccctggccttgtggaacgtgacgccatgggcgacgcagcggtccatcatggtggacttgagcttgcggcgggcgacgcgggcgtaggggcggtggagcgacttggcggcgccgtcgtcgtgggtgaagacggtggcggagggccagacggcgtcgaggcagtgggagagtcccatggcgtcgaactcgtcgacccagacgccgtagttgttgggccagacgagggcgggggaggggtcgatggcgcagacggagaggcccgcctccgcgacgcgctgcgcgacggcgaggccggcggggccgccgccgacgacggcgaggtcgacgggggtggagcgggcggggtcgtagcgggggaggtcgagggagagcagctcggggcgtgacggcggggccagcgaccgcagcgcctcgccggcggcggcggcgcggcagacgagcgcgcgcgtggggcgcggcgacggcgagggagggggagggggcttgcaggaggggtgggcgcggaggaggagggcggtggtggccatggcggcgcggcgtggcgcgggaggtggggaatcgccgtgcaatcctgataagcttttcttcctcttattgcgggtggggcggccgcgaggtcagggagagtggtaggggggcgccactgaacactgaacagtgattcagtgcccactttctcccaactacctggcttcttgcaattttgcatgccaacttattatggaattttagaatgggaactctgctgaacaggtcctaaaacgtaataattcttagctatatatttccttgtttcacaatgtaaatcattctggtatttttcatattcatattaatgttaatgaatttcacattcatattgatgttaatttagatttattaacatcaatatgaatgtgaaaaatactaaaataacttacattgtgaatcagtatcttagcaaacttattatgcaatgaaaatattatatgctttttggatagtctcattcgtagatatccaatcagaatcataatgtggcaaatacggttgagtcagcatgccggatgtataaaaccaactcgcaaaataacttgtgcgttaaacgggtcaaattataaattagtttagcgagctatacctggtttgatatttttgaggggctagatggatttaggggcataatttagggggatttggacttttttccttttctaattgaagcagcggactcttttcccctttttttcattaattatgattgtacaaaaccattaaatggttcgatcctacgtattttcagctttactagcagtttatcagagaaagaaggaacttgctacaactctatccgtgcatgctgttaagacttggctaaacaaatatcctacggaacggtggttgaaggcacctatcaagttaaccgtgtcaaaatttagtgttcattttaaacgtgttcggtcctatttgaaacataggaattttcaacatcgtccacaaaaaccgacaataattaattactactttggttaccacggtgtaattctgaaaaattgcaaatttcgatacaaatacggtaatgattcgatagaattcggtatatagttctactaaactgaagcgataataaccgtgcagttatcaatgattggtcggtagtcaaattacgacttcagcaaatcctgatattctcaacccaattggcttcaagttacttctagttattagacctccaatagttagatggtcctgtttggattatatgattttttttccccaaatgtctattataatcaaaggccctgtttagatcctccaaaatggcaaaagttttgccattttggatctaaacactagtagcaaaagttggtaatttggcatttggaatttgctagtccatagtagcaaattgtgctaaaaagtgctttgggaccactccctctctctttctctctcactttagtgctagaatagcaaaactttaacatgcatctaaacaccaactagtacttttgcaatgtcaaaacttttgctaccaaaacttttatcatttgccatttaccattccaaatggatctaaacaggcccaaagatgttttttttaaaaaaaaattgaactactgtgtttttctaagaggatttttttaaaaatttttgaacgtttctaatttttaattttaaaaataaacccttttaaaacttattttcaatatctgaacttttcttttcacgccagccgaactagcgtggcaaaacaacactgtcacggtagcctggcagttggcgtgacagtgttatttggtcccgtcgatctggctggcgtggcagtgttatttagccatgttacctcggtagcatggtagaacaaaattgtcacgcctagtgtgtggcgtgtcagtattattttctcacgttaggtgaactggcgtgactaaaatgtttagattctgagaataagttttagaatggtttatttttaaaataaaaaaaataaataagttcaaaaaataagaaaaaatctctcttagatgtgttgacacaaaagatgaaaggatagccttgtgaaaaagctagttgtggattccacatgtagatcctatgaaagtgcgacccaaggtgaggacaaagacacacacagagtagaaaagttcaatcgttttagggcccgtttaatttcctaaatttttttcccaaaaacatcacatcgaatctttgacacatgcatgaagcattaaatatagataaaaagaaaaactaattgcacagttataggggaaatcgcgagacgaatcttttaagcctaattagtccgtgattagccataagttctacagtaacccacatgtgctaatgacagcttaattagtctcaaaagattcgtctcgcggtttccaggtgagttctaaaattagttttttttcattcatgtcagaacaccctttccgacatccgatcaaacgttcgatgtgacacctaaaaatttccttttccccaactaaatacaccttaggccaaagctgccactactgtcacatttcaagccgtccaaatatccgtggcaacttatgcctggacaacacatgaaaaatagttaaatagaaacgagattttaaatataatccgagcaaatgtatgtacacaacgagagtccacatcagcctatatatgtaccagcaaaaaggcttccatggccggcaagcaaaaaaagaaatatcagtagttaagctgaaagtgagagaaggagagcatgacacgtgtctgctctatggacccatggtaggaagaaaagccagccatggcgaagccagcgacctcgtcaagcccggacaacggagtaacttttattattggcaatttttatggggctttattaaggagctaaccatgatgtatggtgatagcgagttaaggtgaccgtccgacatgcccgggagctggctctgtgattagagggaaaaccaaggaacaaagagagaagagatacatcttttttaactttgatggattaacagcttaaattagggaacatcaagggtggtgacatgccatcactgtgagctactcttgctaactaacaaaaatgtcagcaaagcaaagagcaaagccatgcaatgctaactggaagctgagagcctgacagtgatgaccatccgaggacgaaaggaaagaagaattgatactacagcttagctatatggactgtcactactgattaaattaggctacttaattactgtatatatatttctaagcaaagcaactagctggtactagtagtgttaagattaactcctagttgtgactgggaggatgccgacgaactgagtggtaatctgcagtgaatggcatgtggccatcgaaatggatcttgccatctgcatctgcaggaagctttcttgttctgaaattcttgcagttcttcctcccgttcttgcatttcctcatgacagcctcctgatgatcatgttcagccttcgccgttgctctggttacactgacagagctagcttgattatcctgcttgtcacacaaaaaaaattcagcaagttaaacctcagataagtacactgctgttcatcgatccatctcaaatcctcaagagcacaaggtgttttactgaacttaccagcttggcctgaagatggtctccaatttcatcgacttttcttgccattggcagctctgaaaagagacagtgataattttgtgagtgacaatcttcgagcaacaaagaccaaatggctcagaaatgggaagttttgcctgaaaatgctgatgatctacctctgtgtgcagtggcaacgaaggagctgagtgcagcaaccatgaagaacagcaagagcaacaggctgacccagttcagctgctgcataactaacaaacctactacctaaactacctaccaacctctgaactctgaatctagtctccagaaaaatctctgaatctgacttcaggtataaatactactatcacaacgaagagaggagaagagagaaagcaatactgaaaagacagtggtggttttatatatagacgtggaggagttcatcgtcaggtcagatgaagagaggcaaacgattggtcaaagttgagcgtgcccatgcatctactaatactgcacctgtactttttcttgcacttgtttacactgatgtactccctctatgttttacaatgtaagactttctagcattgtccacatacatatagatgttaataaatctagacacatacatatgccggatgtggacaatgttagaaaatcttacagtgtgaaacggaggaagtagctaggtgctaattaccacttgctcatttggggctaagcgtaggcctgtcgattagtcatttgtcaagctgctgttaccgaagatgtcgttgaaaactgtaagaaaagaaaggtgcctcgatctctccgagaggctgctgctgctgccattgcttggatttgaagattctgcgatcaagtcgtggcttccgatgagattgaaaattcagttgggtaatccttccgatgattcggttctgtgggtgtgctctgaaaccgtgagttaattaagccattgctgctgattaatcaatcgatttaatacgaggtgatcgaagcgtaacacgtagtgagcaagtaagtgtagcagatggcatcccgtgagaacgaaggaaggtaaaccgatgcatggatcgatcgattgcatgttgtggtaatatatacaagtagccgtcgttgctgtgtcggtggcaattggaagaacacatgcatatgcatggtgttctcctcgatccggtgacgagggcttggtgtagggcggtaaaaaaagaaaagctcaaggctcgcaagctgctctacctcgactctagctctagaattcttattgtaaactagtggatcaaatataccatttagtataccattaatatgtatccaaatagcgtgtattggtgtcattatcatatatttatcttatttatttttcttcttatttatcaatataattaaatagaaattactatttttatggagagattatcctcaaaatatatgtatatactactccctccatttgttattgtaagtcgttcgacctttttttcttaaatccaaatcttttaagtttagttaagtttgtagaaaatacattaactttttcaatatagaacaaacaaattatcaaaatttattcaatgttaaattaatctgtgttatagatataatttttttatgtaaacttgatcaaacataaataattttaactaaagaaaaagttatatgatttataatatgaaatagaggaagtacttatgagccaactttattagttgagctcgagctcgatcgagcacgaaccaagcctgactgaaagctcgagctgaaggccagcaggtgagctcggctcgttgacggctctagcttggttgttggtgctaatcatcatggattgattccaagatgaagcatgtgtactgctagtgtgatggtacagagtagtgttagtgtaccgtacgtgctggtcacgaggagaggacgttgaaattcgaagatgagagattaccagggctgcctaggtgctctctgatcgatacttctacgaaagaatcaaatattgctgcactaaatagtaagtagtagtagtgtgcattttttatggttatggtttggtaaaaaattttaaccctacatatcacatcggatatacagatacacatttaaagtattaaacgtagtctaataacaaaacaaattacagattccgccaggaaactgtgagacgaatttattaagcctaattaatctgttattagtaaatatttgctgtagcaccatattgtcaaatcatgacgcaattaggcttaaaaattcatctcacaatttcttgatgaactgtgtaattgattttgtttttttctatatttaatactctatgcctatgtccaaacattcgatgtgacagcgtgaaaaattttgtttgagaattaaacaggccctatgtatacgaacaagtaggatgcaacgaaagtaacagctctgttcaaacggaccgaccgaccgacagacagacacagtcaactcggtcttctgaaagggatcataaattcttctctcttctttttttgagaacagggatgacaaattccaaattggaaatacacttaaggcaaattttataaaagagataactaataaatatactaattctaatatactactagtcctaatatttatttggtcaatctactctttctctctccttttatcttgaattttgtgtaagggttatctctcttattttacctctctatttaagcttatgtggtatcttgaatgtttataataattgccattatgtacatatcacgtagtactatgtggtgtttttagtttgtggttactaactgcctgccgtcatttcgttccctcatctcctttccactcagcgaaactggatggatatatggttgagaggagaggaaagaagaagaacaagaagataaataaaacgagataaatcataagctattaatgtatgatcaattatgtatcaattattttaaactttaaaatcgattaatatggttttcttttctaaatcatatttttataatttcttttgggtaaaatactacacaccttttaatatttaattgttaaaaagcgcccgtgaaaaataagtgagttttttttttctaaacttgcgctgctgaagaacgcagcttagctaggctgtagcaaactggaaatttggtttgggtaggcagtgaaatttggctggttgattgcaggacgtgggcgcacggtcggtcgcgcgacggttttggaatttggaggcaggggggacacgagggcgtgcgcggcggatccgatcagggcgccggccgtcggtggccgcgcgccgtccaggtggactcctccatcgatcctcctgacctgatgatgttggcggcacattcttctcatcatcctcggttcagactacactcttgatagatcacacagtttgggttagggataaaacgtttcggaaagtttttgggtttctcgaacgtatttggaaacggaaaatatcggtgggaatttttttttccaaaaggtttcaaaaataaaagggactagctagctatcactcgacagattttttttgttaaagctcacacgttttttcaattataggattggactagctattgtttacttgacatactccctctttccaatgtttgacgccgttgacttttttaaacatgtttgaccgttcgtcttattcaaaaacttttatgaaatatgtaaaactatatgtatacataaaagtatatttaacaataaatcaaatgataggaaaagaattaataattgcttaaattatttgaataagacgaacggtcaaacattttaaaaaagtcaacggcgtcaaatattttgggatggagggagtattttaatagattattatattgcattgtatttatttcctaatttaaaacaaaaatattagtaccaacatatatatacttgaaagttacactgtaattataatataattacagtgtaactattatgtaattatagtataactataatataattatattgtaactttaattatagtcttatttggcaataaaatccaacaacacgttatatttactaaaagttacaatgtaacaatactaaaattacattgtaactacggtgtaattatgtagtatcttagaatatagtttttttaagcttgaaactcgatgtattcctacgaataatatctgaaaaaaaaaatcatgaatagccttcccctcggacacgtaaaacggaatgatgaattagcacatgattgatgaagtgtttgctataaatactgaaacatatatagattaaacaacacaagttttagcggtctggaaaacgtgcatgcaaaaaactaagagcaaaaattggaaagatggagtaaagaacacaccctgctggggcctggggagcgtctgctgtaacagaacgggtaggcctatggaaatccaaccaagctttcgaggacgagaaaacgaaccaaacgcattttattttattttattttgaaaggaagcaacgcatttttgctataacaggtgtcaggaaaagacggccggtctgtgtctaatcttcagctcttccaagcatattacgcagataaaactatagcaacaagcatttgtggcatttgtcaaacacggcgtgaagctcttagctcactggaattatgtcataaaaatgaccacaacgcataaaataccaccacaaacacggtgtcacgacttcagactttcacagacaaattaagcagaaatgggtgtttccccgtaaaacaagctggaagatgatcattggcccattgccatggaaaccagttgcacagggtgctccgatccatcagtctgccagttgcacgatcaacgatcttctgtcaaatttaactgctgtatttggcagaagttagcactgttccaatcaacaaccgtaaccagggctccaggaggccaccacaactacagcaaactaaacgatctccagtatcacaagataaatggcaaccgagagagtttgcttatcacggatcgcttactttcctgcaggcacatctcttatgaagcatcaagtatcaaccacttggggaaaaagaaaaagaagatgcttatggacaaataattatttcatattggaaaaaaatcaagaaaaacaatacaagtcccccccattgtagtgagacacgcctccaacgaccaaaccaatcacccgaatgaattaagttatacaaatggactacatacagagaaccccaacgctaacctttttggtatatatatttttcttcagctcccagatgcagttgttactctgaaacagtcgatatatctgacggacttcatcaccccaccaaagctgttacaccatggatcaaattagtcaagaaaacatgttatatatcaaccctgtagaaatagttgatacatacacagcattatggtcttaaagaaaaagaaaatcataggtcaacaaggtaaccataccggtcaacgcttttccttggccgatcaggctgatcgacactagcccgtggttggtccacactctttctgtttttatccctcctatctgtgctgccccttgatttgtcccggcgatctgtgctttgtctgtgatctatgcttggccttgttttctccctgcagtctgtgcttttcctagattcctctgtgccttcagggtttgtttgagtattatctgatggacctgagctctctggagattcatcatataggggtggcgatttttcaatggccccaacaaacttctttagatgcttaatgtactctgggtacagttccaaattacagtggtttcctcctttgacccatagaggctcatactttactttggaaagctcccacaatgccctcccatgggaacagtcgacaacttcatcagctgtaccctgggaaaagagattgtgttagtaccttagcatcatcaactttcttctacatcttgattagaatgaataggttctttctcacatcataaatctgttgccaagtaaaataatgtagcaagcggtagtcatgataaagctgatgctgctaacagaatacttgtcccgtgttttcagaatatgttgccctcaattgccagttttttcatctcagtgaactgaaaaaacttctacaggcattcacatttagtttccatgccatctttttaaatgcattgctagcactgcttctgtcacataagcacactaacggcactaaaaaataacaggaaaaaaataaactaaaggctagggtgtaggtcaataaaagaatggtccaattggtagttaaatcaccagaactgcttcattaaacttcacttatgtaacattacaattatcaccatgcaccagtgtacatatatgaggaacatacatataactgttgttgatttcatattccaatgatttaattcactatgtgaacatacaaacaagtgcatgagcacatgcacgccatgcacaaaaagaatcaaatatatataataataataagatttgctgtgaggatgaaatggtactcacatgaatcactaacacagggcatctgactaatggaattttgtcaatattctgcagaaatagagataaaatacagaattaactaaagttaagtgtcaaaaaaggttgacataatgcaaattaattaccttgtatatgtcaaaccagtatgtatgttttacaggatacatcactcttaagccagataaaattgggctatgcagaacaactgccctcaaatgaggcaaacgggaggctaaatccaaagtaggaccactacccactgattgtccataaagaatgatattctcctcggaggctccataggtttctacaagacatctgtaaacggcttctatatcagcgtaagtgttgtgctcactgggctgcggtattagataaaaaataaaaggttaatactatgcacatcaaagagattcggcataaaatatgtgtatacaaaaatcttaccttcccagaagattgcccataaccagaatagtcatagctgcagaatgaagacggaaggtattaatttagagctacaataagccttaaaagaagaagctcatcgagtgatgtcaggtggcttcatttgatatatcctcctagttgtgggttgtgaaactttccttgtgcaaggtgctaatattacattaggagtaaaacatggagttatagatgcaacactcaaccatataagctggcaaggaacggattgatcacttaagactaaaactatagcctcataaatggttacatcagttgttagtttagtcatcatggaccatgttagcaggagcctctatggtggcctagaactgcattacgcagtcaaatactagcaactagtacacatgcatagtcttggtaaaaagtagtgagcacataaaaagcacaaaactaggttcaacagacaaatgacatagctatacacagacaaacaaataacgattatattagtatctatgctaggaaacaaacaaaaaggcgaagttaaaaaaggaggaaaggacaagccaattactcctaaccacaaaatataaaattagttagagctgcaagatccactgaatcaatcaatggttctcccatcagcaacgccaataaccagaccacacatcatctaacaattcactaggccaaaccttcacagcataatttccaccacaataaaggtaatctggcaaggaaacacaataaagaaaagagcaaaggtcccttcatccaatgtatcaagtaacttggaccaaagaacagaagcaaacaaacaaacagaatggtgatttgtgttatctcttctctacctctgggtacccagcagtactgacacaaattactcaactgtttgaatgttctcgcagagaacccacaaggccatgaccggacatttgcagaacaatatggaggttaccaaagacagatggcaaccctgacattaactcttctataagagctacaagagggaagaaaatgaatgcatgtaataatatagtgaaaagatttgttaactattggtttcctcaacacactttattaataagtaacggtacaatttcatgtacacgataattcaaccaaaccttcattgcaaacattttcttttcactacagccattgtttaacaaatctaatgaaacagtagattaaactcagctaaatgttaatatctaacaattaattgaagaaaattatccaaagcttcaaattatgacctaagatagtaacaaatcaagtatccaaaagcaccgagctccccaccgtctcccatagaaaaaagcgattcatgaaatacccgtacagaaccagatagcgatttatcaatatcattcttgctacccaagatcaataaaaagtcaaaaaatttcacctaagtggacatgcttcaccatctacatcaccaagagtagataacaattcgaacacaagaagctatcccaatcaatcattaaaaagatcggcttcaagggaaaaagaaaaatgatcagataaccccattagcaaacacaaaatatacatgccaagatgcaacagaacacacgagatcatgagtcaaaaaattcacatggaatcagagacttacagcctgcgaatcctaatcctacagcacagaacactattcaacatcaacatcacaccaaagcatcaacctaatcgaacgagccctgatgaagagaagctagcggcatccgtcgaaactacaaaacagccatcctactgatccgcccggaaaatctaacgttcccaatactaactaatcctagaaaatcgtagcttcgagcctttgatccaggaaaatacgccccacccggaagatccgagatagaactcgaatccacgagggcgacagagcacggcatctcccaatctaaaaaggcaatccacccaatcggggcgcgcgcgcacgtaccccatgaggttgacgttgaggtgggcgctgagctcgacgaagagctcgaacatctggcccaggtcggccgcgttgccgtgcgagtagagcagcgtgagccgcgccccggcctgccgcacgtacatcgccaccacctccgtcccccgcttcgtccgcagccgcctcgcctccacgttccccctcctcggcacatccgtcagctccaccaccacccctcctccccctccatccttctccacccccacccccgcgcccgccgcggcggggggaggcggggcctcggcgccgtacgacggcgggctcggcgggaagaaggcgaagcgggccgcgaccgtcgaggtgacggctcccatcggaggaggaggattggtagggttagggttagggttagggtttgcgccgaggcggaggaggcggaggcggagaggcggagaggggaagaaggcgacgacgggaaggaggaggaggggagcgcgtttccgtttcgttttggtttttttggatgcaaaggggaggagggggaggaggaggaggaggaggaaagggggcggtttgtgggtggttaattgttgaggtttttaatttcaagaaaagaaaaggttcatcccaacaaccaacaaaaaaaaagttggaactagaaaaaatggtttgatggtttggtataattggatgatttggtgcaaatagatccatgggattttggtgttatcctttgccagcatgtttgtatgctatctgtagcagtgtttcttttttttaataaggtgtaaagttatggtttgtttttatttgtatgatcattactattatctagaaaaggctggagatattgtgttaataaagtttgagagcttgatggttatgtataatgggatgatttagtatgagtggctccatagatttttggtgtgatccttcgccaatatgtttgtatgtgaaagaaaatgcaaagcgacggcttgtttttagttgtgtggttaaattcataccggcttaaacagataaaaacctagcgttaatgttgcttcatatgcaccttgtttaaactgaaactcatcagttattacacattatatttgcatttatcaactaccgctttatattcggagagttctcatgcgcacgctaagactgaattatgaataccaaattcactccaagaagacataaatgatagatatgatcataacatgaatcccaattatctgcagttttattcaacgtgcacattccatcatcattatcatctcaattccctccacacttggaaacatgccattcccatacatgcttagtacttcatccgtttcaaactgtttgacaccgttgactttttagcacattcttgactgttcgtcttattaaaaaaaatttgtgaaatatgtaaaattatatgtgtacatgaaagtatatttaacaatgaatcaaatgatataaaaagaataaataattacttaaatttttttgaataagacgaatagtcaaacacgtacttaaaaagtcaacggtgtcaaacattttgaaacggaaggagtatgagtttttgaccaatagaagatggaccaattaaacacacgtggaaactcttatcgcaattccttacagttcacctaacatgattatcttgtaaccatgtattggatcatgacatttatcattgcaaatctttacaaattcataaataaagcactcacaaatacatgtggttattaattacttaagttaattagtgacaagtgcaaccacaagagcatcattaattttcttttctaaaagagtgggtcgacatgtccatgatcctaattaagaacaaacagcagcaacagacggccgacaccatcatggtgcaattctgaaaaagcagaggggccaatcctgcagaagatgcgctggataaggtggagattatggggagggaacgcaaggctgcctacccccgtggaggcctcaccattatcgacaaagagatgcttttctccctgcttaattaattaatttaatcccgtagcaatcggggcccactccctctgacaggtgggccacagctgtgctaggtcccactgtcagtgtgagtagtataaagaagcccagtccatattagtgcttatttgcagtgttacgttaaatcaatcaatcaatccctttcttgattaatttagtaacttctctaatggggaagtgtcctttttagaagaacaagtctaacctaacctgtttttccgaagaaatttgtttaaattggagtactagtagtaagacatttgggcagaagacacgaggtcaaaccgacgtgtttcccggagtaatcaaatggtggtcaaattaccctgtgctggatgataatgacagtttggccacagcaattctcaactcacactgcctccacatgacaatggattccatgaattgaaaatgtgcaggaatctgggttggaatgtgcacattttcatcagccaatttcttcagagtttttctcacagatctggtccacacaccattttcctaacactgaacatgatcacaacaaatagggcaatgagaacaaatcttacactgtggcaatttgtcatttgtcgatgctgtagcaactagcaacaaaatgcctgaaacatcacaacttggctagcaccatgctactatacatgtgttggaaacatcagagataacgggcatcaaattctcatccacaggtttggtttctacctcgcttagataagctcatatgacaaaaattaaaatgaaacatacagagaggaacgattattcattgggtaggagcaatgttatatgcggactttactttcttttccaagagggaaacatgcttatcaagcatggacaccactgcctcaaactcggtcacctgctggtctatcgcatcaatctgcgatacatactcaccaaagctttggtttttctcattcagttgttctacgaaaacccgcaggccggatgcaacatctccatagttattgtattcctctgctacacgtcgattcattttctcaagtagagaaagctggctgttagtcccctgcagtgaatgagatccaaatgaaaacccaagtctaataaataaccacaccactaaacattaagcataggttcaactgttgactcacagttcatagtgaacaaaaactgccatattttacttcaaagtccagattgagcaacccataagctttaaatgtttaatggatccacatgattaggtgaagttatgtgaagtaatcattttcatatcatttatgcacacttatgccggcaaaagaactttgctgtcgaaaagctcatttattgctgaaatgatgataacaatttgttggcgaaagcgaataattgagaggtagtacagttctcaacaacacggaacaccaaattcaagtgaatagcctctggttgcttcaaaccaaaggtctcacaatatcattgtgcataaactctgcatgttttgattccacatgccaaagaagagtgaatcaatgtctgttagtacttgtgaaatacgagttcatgcaatagcacccgataccttccttccccaccgtactgtgcatgccattttggccgcaaaagatgcactcatcaatctcaaaaaacaacaactagctaaactttgagtcaggcacactatgaatgactaaaaaaactcagctgatttttgacttgctgctaaaatgtgaaacaattccatgaagtggcacgcgagtagcatcaaccaattgcccaattcaatcatgtgaagttcacactaataactaaactctgaacattcccatttatcgtgggataccaagataactggaactgctacacatccttgggaaacagattgggatataacaattggagcacctgaactatataggtgagacaatctaactataaattcaacgcatattccacgaaaaatatagctaaatttggcactctagggttatcaactctgctgcgattcacagaattgtagggcaggcgccggcgaattctacgacggcccaccgtgcaaccgcgaccagcgagaaactacgggttcaggccgccgatttggccgtccatggatacaaagacgaggcggaggtgggggcgaacggacctggagctcgccgcggaccatgagggagacgttggtgaagagctccgcgagcgaatccgcgagctcgtctcgctcccccgacgccgcggccgacatcgccggcggtcccctgtggcccacccttcctcctcctcctcggatcggagctccgccgtcgtcgcggcggcggcggcggtgtcgagtgctcgggatcggagattgggatttgggactaaggcgtgagtaggcttttgggcccaaccccattggttactcgggccctcttgcggaagacgctctcttgggcccccactggagctggtcctacagttcgggcctcgtggatggacggcacggcccggcccaaattgggcggtcgtcgaggcctatgtagccgtaatgggcccggcccaaaactgcacgattcacccgcaacatcttctcccctctccttcctctggcggcggcgaggcggagggcggcggcgcgaagtggtcagccagagcacggtgccggcggcgatggagattcgccggaggctccatcggctcggctcgcacgacgcctggtgacattttcttccccctcttcttttttttttctttttgaattttcataggaagtcacaaagtccgcgttcgtcgcgttattatggagttagcgtagaactgcatctcggatgggttagggtctatgcggattctctttgcgaatgtggcttaagaccgaaatttggttagatatgagaagagcagtagtggaatgatttatcttctctttgtttaaaaatgagggagtatttcgcaagcctatgcatatcttagcaaacagaagatactatgagaaaaacacatcttaagatgtattgcacataaattacagacatgttcttatggcctatcgataaacccacatttctcgattaaatgtgacagaaatcttaaacatggccagaatatgtataattttgtgaaatgtgcaggtttatggtacttttataaagttagcatgttttgtgaaatgcatgcatttgagtttgcttcctactattttctagaaagattttttttctagattgcatcctacagataaatatatgattaagaaactcttctttcaatctcaaaataatttaggagaaatgaattagaaaaatttgttgtacatgtacatactgtactaagcacaactatttttatgcttttgtttaccatacattttttacaggattttgacttctttatttgatcatagtacaagtttaattttaccaatttattgtgagtgaagttgatttttttactcggtgggaccatactactacacatgttttcccagttgcaggtgggtcctagtcccacatattgaattccatcacattaaaatgctctgacaaagtatgtgtagctctagactgctaataagtgcaattgtgcaaactgcaatatgtattagtactatgtaatttttagtagttatgttccgcaaaatttacttgggtgtaaatgccagaaagtcggaatgatattgagtatggtgcagagagagttttatgctatcttactttttttgttaggagttttatccatttttctgtccatgttaaataaccaaattgaagatattgtcaagacgagttctgtttcaataaaagaagacaaaacagccactctttcaatttgttgtgaacactgaaaacacaagcaaacgctagacatactagcatcatataaaaagaaaaagaaaaatacaggcatcagccaataatctcttcttagaaacgtatttcttggatacgatgcaattttgttttccagttgtctcgttcccactctaccttgagttcatggtgttgcatcgtgacattgagcttcttgagggatgcaagaagctccaaacctttaggaacctccctgagggatgggagcgacagcagaagcagcacttccagcctaataatggccccttcctcaatgactagccttctcaactcctccaattttcccaaccaaagagtcctcagctgaggaaaccatcctgcacggagaattatgtcctcagcccaacatcccctgcgtatgctcaaaaatatcagatttggcacgcttgatgatattgatgggagtggattggtgtcatttttgcaaaatgtcagtgtcaggtacttgatatttgcaccatactcacagaacactggtcttcggaatgtctcattgtcccagcatcctctgattgtgagcttctctagctttgtacatataggattgaaagcattaaaatccagaggttcattcagatcgttggcgctgatgaccaagtcataaaggtggttcatatttgataaggaagaaaacagtgttgcacagtcagcacgacaaacattctcgacacacagaagcctcagctcaggcaagtatttcagtagcttcaccgattccttggttgcttcaacagtctggagagtctgcagctgtgccaaatcaaaagcacagtcaggcaatttcacaccacggaagtaacgcaattgcctctcttctgggtcatacaattgctctgcaaagatgtgcctcagcttctttaatttagctacctctcttgggagcctttcaatgttagttgatttcaagtccagagtttccaaattggtgagctttttaattgatattggtagggacttaatacgtgtcctccttaagccaagatagcgcaagttgaacaagtccccaatattttctggaatcttgtccaagggtgagtctcgtagttctagaacagcaaggtatttacacctggaaattagtaaggttaacaactgataattagcaactctgttggctgcaatgaatgtccggagacgaggaaggtccatgcttgattttatcagctgattcacctgatcaaagtttgacactaacagccggcgaacatcatccttcttttgagtttcaaggtttatgtccgccagaccaaatctttccttcctagaaaaggagagtgctaattccctcataatgtcatgcatcctgcagcttaccactctaccaatctcatcgttctcaacaagttgcatcatgctttgttggatcagctcagtgaagtagccgtctgcaacctcctccaatgtactctgacctcgctgtattacaaagccctctactatccatagcttgataagaagctcacgcttgaaaatataatcttgcgggaacatactgcaatataaaaaacaattcttgagatgccttggcaggtacatgaagcttatgctcagtgcgctccttactttgtctaggccagggttgtcctccaattcacacttgaattgattgtttattcttctccatactatctcttttgattcctgtacagccaatacatttcctattgcattaattgccaacggcaagcctccacacttatttacaatctgcctagacaattcctccaaatgagaggggcactccatattgcttttctggaagcaccttctatgaaagagttcaaatgcatcatcattgcctagtggattaagcttcatcttgtacatttcttgagccaatgaagcaacgtcattattcctggttgtgattattatcctacttcctttcttatcatccatcaatgagtcagatagctcatggaaagctctagtatcccatacatcatcgagtacaatcaagtatttcttatttgacaaaacctcctttaactcatcattcagcttaccatggtgcatagtgtcaagatcagtggggattttgctttggtcctcgctcagctcttgaatcaactgccttaatatagcattgatgttatagttatgtgatactgcaatccatgaataacagtcaaagctcttcattcccttctcccaatcataaaccttcctgactagggttgttttacccaatccaccaaaaccccatattgatattactgttcgatctaactccttgggatctagccatctgccaagcagctccatgtcttctttcatcccaacaatgtcatctcctttaacggcatgaggagaaccattagatgacaggagatgaatatgagcactatcactagtgttgtcaagtaattcattgaacatttctcgataatcccttttcagctgtgacaagtgcttgatctcttcctcgatatctttaagctcaatagcgatgcgatgaaaagcagttggatagaagaacttgtgtattaaccttttaaaatggttttcatgttcaagagctatgttatagctgtactcatctgttatgtcctcaacacggtaagcgaccttccgcacccttactatccagccttcaagaactttattgctgtagatttttgttccaacctggctcaagaaatgatggatcatgtctaattccctctcgatgtgctttgcagtgtatggtagatctgggagccgtgcgggttctttctctaggtaagtccttagtgatgatactccaaaagaggtaacaagcttgccgagagctaggactactgctgcctctgccattgtctgtcttcacttactgactgatgtgttacttcttgtggatatgcaagattaaccggtaagagctccttttcttttagcctgttgaacaaaatatgatatcccagctttattgtctgtcttagtgaggcactgaaaatttgaaatgaacatggtggtgtatgttaatgctggttggtactacttgctaatttccgttttagtacgccaagctatgtatttcattaactaggaatttgatgactttcggtatatttcttggcatcttgctaccggcatatttgctactaaattttattttgagtggttcaaaaaaaattatcttttcggagattttttttcagtaaccggatgaggtacatatgagctattaagatttgcaggaccacatgcttttttttttgagtaaaagatcacatgcctgttgatgatgcgcagttgcagatatgatcctttgggacaggaggggaagagagaagaatcctctgcgatctgaacggtctcccctgctccactggaaaataagctcgtgaagaaagaaattaatattcattgtccagtgttctgaacccaagtttgcagttaaagcatgtagcaatcaccctgcatgtagtcacaactcaaaaaatgagatggcaaaactaagtagtcacagctcaaaaaatgtctaattctctctatatgtagtatggtactcgagaaaagtgatgaactcacctgatgctcaaccaaatcctatgatgccattgaagaccaaattaatcgccatgaagtgaacagtggtttcaatgatgtgctgaacattttgtggcagttgaacacaggaggcttgaagcaatatattgaagcatcaggtcaactcatccttaaattgattggatgtttaaaggtactatactactatgttgttgaactctagggttttgaagtattatttctagtgctaatcctcacctgtccattcttagataaataaaatacctatcatacatggtttctttggtcaaactgaactatctttgcgagacaatttgtgtttgcttgagtgtaatgaacagactaccataataagaatataaaagccaaaaggtaactgtgggtattattgtatgggtgataccatgggctttgtagaataaacttctttagaatgctttgtgttttggttttgcatcattgaatggtgacttggtgagctcagtacaaagtgttcactgttcaattgtggattgtatcttggaaacggtaaccatgcatatctgaagttttatttgaccataattaaacgctcatatttcaagtggggaattgtgtaaattgccaatatgcagcaacatgaacgagaatgttcagtactcactgagtacgtggagatgtggagttatggggcaagttcttatcaactgacacagtaagatactaagatctatcaatgttactgcgttgttagcagctgtgaaaaaaaggtctatcatcatataatctaaagaacagttttgctattatcggaagaataattttgctcgaaatatcatctatcattctcagctcaatctttcgcctacagcggtttacaagccgtgacctttattagcgataaaaaatggataaaacatatgctcttagtgacgtaaaaattagtcgatgttcaaaaataaactactacaataaaaaaaatcaaaaatcaactctaaaattaaaatccaaaatccaaaattcggttgggattgaaaagccgtagaagggttgattggatttatgctatgccatcacttgcagttgctgacggccacatgtaccgggcaacgaagagagggaaatttaactatttgccactcttgtgacataacaactaacgatttgccacaccgtgtctatgacatgtgggccctcatgtgtctgacatgtggactctcatgtgtctatgacatgtggacctattggcaaatcgttaagcaccactcgtaagagtggcaaatagttaaaaaccctacgaagagaagccttcgctaccgctggttaaatggtttgatacgacaagtcagaataaatgttttacgggcgctcaattctataagcttaatttggctgtgaatgtaggcaaactctgggatttctttttttaaaaaaaattgtttctttgcatgccatttaaatagttatgattttttttaaagaaaaatgacaataatatgtcactttaaaaatatataagcttaaatttaacttttacaaattacaatgaaaaacacaaatatgactgtgagaacatgtatacaaattacaattaaatttatttattttacaatttatgaagatcaaatttcaacttacatgtctgtgagttatatattacatactaatatatcttatcaattttttttatttttttacgacaatttgaatgacatgaatcaacgagggaacatcccttgacggattaaaatccatttccgtgatatgggcctaaactttccgacatgcgggctctctcagaggcccattttctctgcgtaggtgagcaaagcccactatggcccacaggatttggcccactatggtcgggtcgatcacaacataggccatccaaagccgcggcgccggggagcgacgcggccgccgccggtgagctcgagggtcgttgtgcacgagctccggcgaagaggagctcgaggcaagtagtgcgcccgccggagctggaggggttgcctcggccctcgagggaagcactcgcggcggcggccatgcccatgcacggagcgagccgcgctcgctgacgaccgccggcgtgcggccgttcctgcatctgctcgacggtcaccgccggctgccgggaccgcgggaacggcttcctcggtggtcaccggcatccgctctgctcacccgagagagaaaacggagtggcggagacatgccgccggcgccatggccgacgccacgcaccgtcaggcaagccgccgagctccacgcccgcctcaccacctccggccacctcctcctccacccgccatccgcccgccacctcctcaactccctcgtcaactgcctcgagccccatcccctccacctccgctacgccctccacctgttcgaccgaatgcccccctccaccttcctcttcgacaccgccctccgcgcctgctcccgcgccggctccgatccacaccgccccttcctcctcttccgccgtatgcgccgcgcgggcgtccgccccgacggcttcacgttccacttcctgttcaagtgctcctcctcctcctcccgcccccactccctcctcctgtgcacgatgctgcacgccgcctgcctgcgcaccatgctaccatccgccgcgccgttcgtctcgaattctctcatccacatgtacattcggctcgggctcgctgccgacgctcgccgagcttttgatgagatccatgtcaaggacgcggttgcctggacaatgctgatcagtgggctggccaagatgggcatgctctgtgacacgcagcttcttctatctcaggctccagtgagggatgtgatctcgtggacaagcttgattgccgcctactcccgtgccaatcgggccagagaggctgtgggttgcttcaagaccatgctttctcatggcattgcaccggacgaggttaccgtaatcgccgtgctctcggcatgcgcaaagctcaaggatttggaactgggacgttccctgcacttgcttgtcgaggagaaggggatgccgacgagtgaaaatctcgtggttgcgctcatcgacatgtatgccaagtgtggtgattttggtcatgcgcaacaggttttcgatgccctgggtagaggcccaaggcctcaatcatggaatgctatcattgatggatactgcaagcatgggcatgttgatgttgcacggtctctgtttgatgaaatggaggtccgtgatatcatcacattcaactcgatgatgactgggtacatccacagtggccagcttagagaagcattgctattgttcatgagtatgaggagacatgacctgcgtgtcgacaactttacggtggtgaatcttctaactgcttgcgcaagcttaggtgcattacaacagggcagagcattgcatgcttgcattgagcagaggctggtggaagcagatatataccttggtactgcactgctggacatgtatatgaaatgtgggagggtcgacgaggcaaccattgttttccaacggatgggcaagagagatgttcatacttggaccgctatgatcgcaggtcttgcattcaatgggatgggtaaggctgctctggagcatttctaccagatgaggtgtgatggcttccagcctaattcagttagctacattgctgttctgactgcatgcagccactcatgtctactgaatgaaggccgtctgtactttgatgagatgagaatcttgtacaacatacatcctcagattgagcactatggctgcatgattgatctgctgggacgcagtgggcttttggatgaagcaatggatcttgtcaagaccatgcccatacaaccaaatgctgtcatatgggcctccattttgagtgcttgcagagtccataaacacattgacttagctcaatgtgccgcagagcatcttctgaagctagaacctgacgaggatggtgtctatgtccagttatataacatatacatagactctagacaatgggaaaatgcgtcaaagataaggatgttgatggaagaaaggcaagttaagaagactgcaggatatagttctattactgtggctgggcaggtgcacaagtttgttgttagtgacaaatcacatccacggatattggaaatcattgcaatgctggaggagatttcacacaggttaaagtcattgggttattcaccgcttacatcacagataacagtggatgtggatgaggaagagaaagaacaagcgctgctagcacacagtgagaagctggccattgcttttggcctcattaatctagcaccaaacttgccggttcatatcagaaagaatctgagggtatgtgaggactgccactctgcaatcaagttgatttccaggctttggaaccgggaaatcatagtcagagaccggagtaggttccaccatttcagagagggaacatgttcatgcaacgatttttggtaaataccatttcataggacaccaatttttgtgtgtgaaaaagctgaggttgaggaacactgtgaacaggagttctcacctagtctccttagtttggaattgcttttgaatttctgatcaccaaaggtactctttcttctccttaattagattcttgttgccattttgatactctaataccagtaatatgcgttttcagtaaaatgatgtcagctgtgtcgagcatcacaatgctctccgttcatcctcaaggttggtagttgatgggctttgtgggtcgtcaaaatcttttggatgggccggcacaccgcctctggggcagttcaggggcaaagtgccaagaccaagacggaaagcaaacgcaataggccagcagcaggcagattgtcagaagggtcatcttcctcctgccacccagccgctgtgatgctcgtatgactaatcccgtcatccctggcttccgctcacttaaggtaaaaaatccaaatatcgctggctcatcctgccccgcctaaaagtaggagcatatgtcattattctgtttaccagtttggattgcgctcttttttttttgtcccctaatttcttctgtttgttggatgactgatgtccataactggagtagtggagtagtaatgattaacaaataattagttcttcaggagcctcaagaaatccatgtttctgaaaatgatcttatccaattgtaagctcaaaaagtttgtgttttttaggtgaacatgatacagattgccctcgtatagccctatgttttcctctttcagtgaagcaaaatccatgctttttagcaaggtctactcccatgcctgcaataccagatgatgtaatatgcaatggaaattccagtgcagaatactaattctttgctgtttggtgtggacaatgggacaacattcaagacggaatcaggctattcgagcattggtaattttggtttctgtgggaatgctttcctggaatcattaatgcatctggtggatcctttagcagttcagagttgaacgggccaactttggatattgaatcatcggcatttggcttgttgagtcagcttccccgaaatttcctattttcagacctaccagaggatttcagccaaagcgcaggtacattgtaatgacaatgttggtttattttgctttgtaatctgagtatgtgctaattaagttatctaccctactgtcaatcgaagaatatgctgttttcctgtatggctggctgatctttgcaatggcattcatctagtgtctgcaggttgagcagccattggccatctgtacatacatgcttggcaggaaaatttgcatttgctagccttttgtttgttagtagctctagtattctaatgtgacagtttggatgagttctctctctccggagcaggtaaggggatctgtcttccctatgcttgcttcattgctgattttctcctatggacagaatctggattggatggctaccattgctgcctgggctgaaggaaccgtaaaatttaagggaaaatatagatccttttcctggaatatttctagttaatttgtatcctagacagtaaataaatgcttagtaattgcaatttattctatatgacgaaacaattcatctgccaatctataagcttatttgattgattgacgtgtgccgcggtacatgcatcaatttctcaaaaaaaaaaaagattgattacagcaacagttatctgaagcatttctccctgtgcatgaactagcggccctcctgttcttcaaaatttttttacacagaatttttgccgctgattgttttcccaacgcttataaaaaaacaatttctcaaaaaaaaatctactgtattgtttggaccaatttttctacctacttgtgaagtttatgtttcaaaatattaatcaagtaaacaatacatcttaattatctgcgcagaagtctgttttagcctgccacatcttgcttaacttctccggaaccaagctgccagttcaacacaattacacaagaatgtacataatctcaatattgatgcacattcaattggattgttcaaatagttgtactcttgttaaggcaattgggcaattatatatttctgcaaatcaacatagcatacagtagcgcgcaaaaaaaaaagagggtagcatacagtggctcaaagttctttgtaacacaaaacagcaactcaagtttcaatgtgcattattgtatatataaacaaccttttcaagtcatccacttaaaattttcaggatgattgaataaacatgtatagaacaaaaagaaaaattctttttggcggaatagatacaaacaaccgcaaccatatcacaattcacaagtggctcttctaaatgttgaaccagcttatgttcaggaaactagacaaatgcagcaaatcaaatcctttcaggtgtccagaataaaaatcaatggctaccaccgaaaatcacattgctttgctgggtattactaatttaaactcaccaaatcattctaactgtacattccactttgtcgctcgaagtatggagttttaggcctccactttcctgtgaaagatgatgttcagtgcatcgctgtatagagccacagaatttgagagcaccgcaagcacaatcatggttaaggccaaaatcttgtcgcgcttggttgcaattccataaggatctctacatgaaagaggaaaaacatacaaattagatcagatagaacctgagcgatgtccaattatgtatcaactgaaaataatactagtggtcactaggttacctgagtatgatcatggcaggaaagataaaaccgataagaacagcagctgtggcaccggtgaattggaacgcgtcccagatgctcggtatgaagatggcagcaagataaattacagcaaggagtgatcccgtgataatggcgaaccttctgttgtcacgagaaatgtgccttgcagtagggaagagcagtccatccaaattgagcctaagggcgaagaagactatgggaaagacgagcatgatgtggactacatagctcactctcacaacatcattgaagacagagctgaatggaatatgaaggttggagtcaaagttggcgagtacatcagccagggtaccctcgccaaagaggagatatgcaaagaagcttgtcgcaatgtacacacttgagcagagagccagtgaagtttgcacaattggcttggtttgagttctatcttccaactcattgtcgatgctatgtactgtataatcatgaaaagttcacattcaggccacacacaaataaacaacagcaagcgtaaactaagtgagcagtaggaaacacaccattgtagtggcaaatgtaggcagtgacaacaacaggcacagctgtaaagagttcccagatggaattagttccatctaactcgggaaagagtttgggaatctccacagttccttcaatgagtctgacaatcgcaattccagcagtgatgacaacaaaaaccacagcaagagcaactgacagtgcagatgtgtatctcaatgaatctataaaccaaagatgttttattagtatgagttaaccgtaaacaatagttagcacagtgaacctcatattacaatgtggaattcacctacccaaacgcttaaagctcaccaatggaccaaacacaaaaagagtcgtagcaaggagaacaaccggacgagaattccacaaatgaggtccaaaccacccctcgaagatgccacggtgatgaacaccacttgttgatgttccggacagcacatcaccttaagaaagaaagatgaatgagtatctactaaccatcaacggtaataatttcaggtgaattgatagcctattgaacgagacaacttacaaccacaacttatgatacaacaataatgagcacaagtgcaaaccatctatattgtctagtacagtggagggaggctaatcaaattacgagtgaatgcttaccataccttaaagtataacaagacaaaaaaaaagaaggaaaaatcaactccaaaacaataacttagtcaacaatcagtatcgatacttagaagagcctcaagcaaataaatataagaagagttagttttaacttttaagctctgtaaacaaatatgggttttcttcacatgtcacatgccatatgttcaacacgagtaattaagagactccctggcttccaagaattattgattattcagaggagcaactaaaaaaaggaactaaacatgtactagcactattcaacagtatggttgttgttcagaagtaggataacaaaagggtgtggttttcagaggcataccaacgataatcatgtaaacgatcatcatgccaatgttgtttattacaacagatgcttgcagcgcgatcctcccccactgaccgaaagtttcacccatcagccacccgtaggacgtaatcttgccctcgtggctgcacctgaccagcatgtcaatggatgcctcagtgagcaacgccacaaggatgatcatcaggataccagggataattcccagcatcttgatgctcgctggcagtgccataattccagcccccacgatggtcgttgacagattgaacactgcaccggagaaagaagctccattgaactcatggatcccctcctcctcttccttaattgggagaagcggtgtggtctcatctcgtatttccttgtgtgacacatgcctgctgtcacttggtgatccattcccaattcccatttgtgttcgctatcctgtatgggaaaaatcttcagttagaacaacaggatctttgtttggactcctacgatcattaattgtcttcgcaaatttgggcagcgtaatttcaagtttatttgtggttcggaaaaacccaaaatgttcatataaggtattcaggagctttgcatagttataaccaccatatcaatgacaaactacagattagaaataagcttgccgcacaccaatccgagctgacacggattctgattaaaagtttgccaataaatgatggcaaaatcacaataaagatcaatctgagcactacccaccggataaaccacttaaaattcccccagaacccaacattttccagctaaattcatacaggatgccttgaacgagatttcactacaaccatcgacaggaagaagcatacatcgaaatttagacgaattcgcctactcggggggattgttcagagtgagatcactcagcccaaccaatcaaataccacctaatcccaatcctacaacaaaccaatctccacaacccaaatttttaagccctaaaaatgagaaggagaaagaaacataccttaccccaaaccccaatccttgctcaataccggcgatcagataagatcaaaagagaatatcacacctacagaagctctctcttcctcccccaaactcctctctttttttataggcgaaccaacgccgggtggatcagcagagcaaaagcctctctcttctctttcacaccaaaccaacaactggaggagttcttgccttccgggtcgccgcggctgggggtcgctttccgcccaaagaaagagagagaaaaggccaaactttccaatccagattgcgtcctcccgccgccttcctcccccttggctcgccaatcaaaatcgatcttttcctttgcctctcctcctcctgcttgtgctcgattaaattaaagtaaataaaaggaaaagaaattccccggcgggcggctgattgcttccttccggcctcgcctttctttcttggtttggtcccttatccacagcaacaagatgacaagttaaaagaacggcgatgcgtgtgcgcggcgactggcgggtggcggcgacggccacgcgacgacggcgacggcggattgcggcgagagggatggatctgccgctactcgacaatagcacaagtgtgtgtttgcgggactatgagaggtgtttttttatcatcgtctttgttggcaaatccgttttatcctcttttttttttctttttgggggcaaatcgtcttgttgtcttgccatatgtcacacgtgtgcatactttatcctccatcttgacaaagccattcaaatcaggtctcacggtgcgggcgcatcctagtcagaaaaaagacatgtgagacccaagacattttcttcctctactcctctctctttcccaatctcactcaggcgtgtccgtaatggaggctatgcttgagctcgtcagccgccttgcctatccatccatccccgacccacgtcccacaacagcgaagcggagggaccgatggcatgccgggtggacgccgcgccgggataggcctcgcgcggaggggcttggcatgcgagcaaacccgcatgaaggcggcgccggtgcacgagacgaagggatcgggcggggctgagctcacgggcgcgatagcgcgcagagggctcggctcgtgtggagatggatgaggtagatgttgtgctaggagcaggggggcaggggctgcacgacgatatgatgaccttgacgagcttgtagacgcaagccgcgtcggggcacccaagtatatatgtccatcattgccgtggctttcacaccagcgacgccgttgcaccatggaattctagctcaggacaggcgaatccaatcgccccactagaaaatattgcttattgaagcgatagattgaataatcacagaacatgtgtacatatagacatcctccttgccataaccacttaaccgacttatagcaacaggatcggaaggattaggaagggagattaacacttatctccttgtgttgttgtccttgctcagcggaagcacatagccaattcagtttgaagtcggtcgataaatcgatctatgtggcttggatcattaagtacggcaaggccaccttcaattaattttgcttcagttttcatcagaaaggctctggtttttaatgttgttgctgggttatttcgttgattgccgagaattcgagcatgcgatcggtgtgtgagcatgttcaccggttgcaggcttgcaacaattaaaaaggcttccttttttgttcaggagctatctgttttatttcagggatggttatttggttaacttgtcttgacagttgacacgtagatttgcgggcgaagggttgctgctacgacatgcagatgcagggaaaagataaagggagtagaggaggaagatgtatgtcacttacaggtgggccccatgtgccttttaatttctttttactaaataggatgctacgtcagtgaaaccgtcatctataccgtcgtcaaaggacctgaattatacggttctgttaagatggagagtgaagatttctggtaccgcggtttaggaatataagttaaactagacgtaaagatgacggatggcaagtgaacttattccgcccgtagtttgataagttcaataatgggccagggcctaacatcttcgtggagatcaaacggcgtcgggtgggctatataaagaaggaaacaaaatacgctttcagactgggaaagcggcatttgaaatcacgcttcctctttgcgagttgcgacaagggaaaaaaaaaaaaccaacggaagacagaaacgcctgccccgatccccatggcggggctcgccggcgacgactcctcattcttcggggacgacggcgacggcgatgagttctgctacgggccgttcgacgtcgaggatctctgctacggcgcctccgatgtcgacgacgattgggaggagttctgcgacggccccttcggcggcggcggcgtggaggagttctgcgtctccggtttctccgtccgcgacctctccgacgcgtcatcctccggcgcccgcgagacgggcgacccccacgacgacgatcccctcccccaaaccctagcccgctccctcgactccgacggcgacctctccgccaccctccaccagatcgtgtccgcgatgcgcctctccgaggacgaagaggaggaggaggaggaggagctactggtcctcggccacggccacggcgtcggcatcggcggcggcggcgacgtagatgggttcatggtgagcgccttcgatctcgacacagcgatggccattgggggcatcctcgaggacatccacgaggtgatgggcgccgatgaggtacgggaagaggtggtggtggaggaggaggaggccggcaatggcggggggatcatgccgaatggattcgagttcgggccgccgccgcgggccatcagtggcaccgccgcgggattccggatgatggtggacgccgatgacactgactccgatgacttccagtttgtcgaggtactcggaggaggacaggtcagggaggccggtgccggcatgagcatgcggccctcgcgtgcgtcccaattggtggtggagagcttgccggaggcgacgctcagtgaagaggaggcctctcgtggctgcgccgtgtgcaaggactcttttgcgtcggggcagatcgtcgccttgctcccgtgcaagcattacttccatggggactgtatctggccatggttaactatcaggaccacttgccctgtctgccggcaccaagttcgcactgaagatgacgattatgaacaacgtatggctcggcgcgtgattgttctagcagcagtggagcatcagggtgcaccggcacaggtatgatgttgacatttagtggaaaagatcttaggtgcactttcatggcggtggcttacagcatgcatcttcataattttttaaaaaaatttgtatttgctctcttttaaaaaaacgaattggacttcaatggtcaatataaaatagtgaaactgcaaagtatttatagttaagtggtttgactaaatttcaatgctaatgtaattattggtgtgctggatattgcctgtctatttgcttattccaaatgtacatttgaattttgaaactcaggaatgaacaattagggatatttaattgtaagctctgttggctaaacatgcccacatattaagttatgaactggagaaagcataggaagcctttagggaaaccagaagttaagagctcatattaagtcatagaagaagcctttaggataaaatgcatgagcagaaaaccactgttcttaattttaaccaaagcaaacagtgaggacctgtgcaacttctctgattgtgtctgtaaggctgtaatggcaggtgacatgattggttcatgtatactgatgtaccagttcgaatgctaatttcattaaccgttgtgaaagcaattggattttactaaacctgatctgggaatttacctctcccttgcaaacattgcaggggactgtggacctttatttttaatgataggtttcccttgatcgaacctatttatgggaccaaattgaaacactgtgaaagtcattatattttactaaacttgagtattttcatccttgcaaacattgcgcttgccctttgtttttcagcataggtcacacttgacccaacgtttgggaccaacttgctggcatattcttagtctgttgtttttacaacaggtagcaatgctaattaggaggcttgtttgacaccagtcaccagtcaccacctgtcttttccaggaatgatatagttgttggcagtctctgtcgatgttatcattttactcggtcttatctttcaaatttagtaaagcacatggtacgattaaactgctgtgttgtaatgtgatgtattgcctcctacattgacagggctgtggagacagcgcaaccatgggtgctgaaggcgcaagtgaatgtgtggtagaaaatggacctgagaaaacttcattttgatgcggtcccagtatttggtatgatgatcaggcagctaagacaagaaactgaactgacgtaggtagagggaccccccaactcccttggaatgttggcaggaaaactgtaccggcatccaacattttggctaacactcagcatattgttgtcctatgatatgctgtaaatgtacaaaactaagtagttcgatccactcattttctcgttcttcggctcgtatgaatgatgagttgtcggttatcttcaaggctcttgcactaatctgattagctacagttcctttttcttgtttctgaagctgaaaacagaattccccttcgaatgcatgatttgtaatggttgggatttgttgaatcttttatcagatcgcccaggagattgcttctgacatgtgatagctaccccaaatgttctctctgacaagttgtctgtctgacaaattgagatgggtttaattgtttttatgacgcattagatgggtttaattgtcacaaattgtttttgtaatctcttctctaccactctttacctctctttggaggtcacagacctgcaatttctgaggggggagcagaactgtcttattacagttttggtatgcatcttttgatttctgaaagtgctcttataacacttgccaaatgtaactgtgctctgtacataaaaaacatcatcagccatgcttaccatttgaaattgatgtaacactggcaatcatggataaagtacagggcaataatgcccaacaaaaggtggtagtagtagcgtttaggactgattgacaattgacatgctcttaatcgaccagtcaaaaggtgctatcaaatgaaatgacatgcatctttaaattcttttgtcatattcttttgacatatctagaggaggagaattcagccattctcaattcaatcgatattagtacaaaatacaaaggtagtagtctcgaattacctatatgctctctttgcacaaaggaaaaataaaaataaaaaaaaaagaatattcacctataattaattagtagtacaactatgcagtatgcaacactccaaggctactagccatgatatgctgcaattaattagtgaacattagaactagcttaaataattaattaagctacttctaatgttcgtggtgctgcagcagcagcagcagctacttcagcatcttccattttcatctcactgagctttctctgcaggtcagaagcttcttctctgagctgggaattctccctgacaatgcgagcatgcttggagatcatgtgattcagctcaacaagaagcctctggttggtgtctcgaagctctgaaacctgagatgagagctcatccaggcgcctctgcttcctcacccgggacctccttgcagactcacggtttgacaccagccttctcttcttcctctcgtcattgccatggttcatcggctgagcatttgcttcatcttcagtcactggaatcatggtgatgctgctgccattgcagctgatgtatggatcaaccacagccatgtccagcaatgcactgagatcatgcgagtaagcgtcggtttgcggcaggaaaaagcttgtgaaatccatgctaggatggtatgcaatgttggatatggcatcatgctgcatgtttgatagggagggggattttggaaggtttgcaatgtggaggaggaaagaggcagtggattttagtttcaaggagttgggtgctctgaatgaatggaggggaaggttgagcagagatgtgttccttttaaattgtcagaaaagcatctaaagttgtagacaatggcctacttgtgttgtaagcaagtttgcctttgcatctttgtggctgtttgagattatcatgttgatttatgagatatagcattaggttattgctgcgaacatgtcggcgtcgtagagaaaggtatgctttctcgaaaaaatgcttttctgtgtggaaattctgtctaaagtaacaactgttttctctgttccaggtagaatctgcaatgcgcatagccgtcatttttcctatggaatggcgattgcaatgcatgtgaaatttacccagagaagggagatgagaaagatttggaaatatgaacagggcatgatatttgaatcttcatttagaaattgcaccagttgtttacaccatctaagttcacaatcagatgtaagtttctccttttctttttcattcttaatatgtcaaatatcatcttgaatgctacacagttatagtgaataatgtgtgctcaaacatagagtaatgcattaggcactctggccaaattggttcttgtgaccaagtaaagcaattaccttcctagccttttatatcaagatgcgacaacaatatcttcagtgaatctgcaaatgttaaacatggcctatgccagcactccaattgttcattccactctgcatgttacgtatagcttggaaactgtttgatcaagacactggtaaattcttctctttctttgaatagtctttggctacttgttcatcttcaatcgtttatttagattcattgacagctagttttacctaaaacagtaggtagatatggtgacctttctggaattcataaataatataccaatgtgctattactcaacagtcctttgtgtacatgattttatgttgtactctgcagtggcattacgaagtactttagttttggactaggcaactaggcttctcatgttattgaaagcttttgtttacttaccaatcagtagtggcaatgattgtttaatcagaatgtaccaaatcgctttggtgtgtagaagaactatttcatgttcttgtgactgattagcaatcaatttatgttgttatcattaaaaagtcgatgattgttaacgatgactccttttgaccattgctttttctgagccttagcctttctattgttatcatgaacatggagttatgtcctacatctctggcaagagtttcttatgaatcatgctcactgctgatggtctaaagtccagactcagttttgcacgcatactctttttttatttgctatttttttttaaaaaaaaactgaattttgctatcttatttgcatatcatctggtgtcttcaagacattttctgttcaaaatgaaagcaattctcaatagcactaaaaaatgaaagcaatttttctagtgtttggtcaggtcctagtcggcaagttcatctcctacaaggctaagtatcttgcttgaggaaactatagactattagcatggacaaggacaccttttctcttttgcaatttttgcagtacctcagcccaaacaaagggttgatcagaagagcttttctgatgacgtcaatggctaggccaatgagccattagaaccatcattcaattatacaattgatattacaggatagggatgtgatttgtggtctaagcaacctttatcaccacaacagttagtgccttagtgccctaggctttagatgaacctttactacaatttcaaactgggcatttaacacgtatggggaacatctagttagttgtgtggcaccaaacaagaactccaatgccaaattagctggaatctgtgaattgatccttgcaaaatgcatggttttactggttcaagaaaaggattggaatgtgttttgtcaataggattgagacaaaatcgtatcagaatccctatgattagcagctaagtgtgactaaagaggcaattcagaaaagaaatgtaagggtctaactttgaggcaatgaaccttgaatatactataaagcagtatacacaacctttgattggtgctactttttttctggagggatgcttatacacaactactactcaattatcaacttttaaaagaaaataaatctaaatagttggctggctagtttcttgatttcttcctaacttgagaactccagacaagaactccaatgcaaaaatagcttggagttgctggaatctgtgagtgattatttgcaaggcatggttttacggattctagaaaaagagcagaatgtgtattgctaatatgattgcgacacaatgctctatcagaatccctatgattagcaactaactgttcctaaagagacaattcagaaaagaaatgtaagggcttaactttgagggaatgaatcttggatatactccaataaagaagtatacacaacctttggttgcttctacttctgtggagggatgcttattcccaattactactaacaattatcaacccttaatagctgactagtagtagttagtttgaaactaaatactagtcagctatttggcattctttctaaatcgagaggaattcttatttgggatttgtatcaactccagattacaatttgtatcaacctttggcggtttggcctgctattttgtcgatgttactttagatatcttaatgaaatggcatatgcaaggcttttgtgttttgtgttttttttttaagatagaaactttgtcctatccagggtaaactcttgatgagaattcagttcatctttgattttgtgtgtgcgtgtgtgtaaaccatgagaggatactactgcttaataattcttcaatttaacatgctgatttttctgcagtttaatatgctattattcttctatctgcagcatggatatgcttaattttgcaatcttgtgttccttctgcttctttccaccgttgtaggaaagatgactcaatgatagatgcctccttttgctcttaattatttattatcattttgcttcaaaagatgagcaaaaggatactcttttctttctgtacctttctccatgaggcaatcattgatgtggtattagcaagaagttcagccactcaagccactgtttttatctcctgtagtcatgtgcgtatcaccatcaaattgttgcaaatacgtatatcttacagaaattacagattaacctggtccaaaattatttacttgagataattcagaatagttttgttgtttggtcgttccatctttcttaacacatgtacatcatgcagcacaaaaattgatcgaatcttattagacaaaaaaatgatcgtattataatttatatttctcagcatcagtttgtcacgtacttattagaaaagcaacaataaatcttgtataataactcattgttcattgcgactacaaactattatagatacaaaattcacaggtaaatgatcttctcgatgactttattgaaaaagaaaacatatatctaatcaacactatgagaaaaagtaaagttgtggttccagccaatgtacagttgaacatacgatgattccatccctcaatcagaacccatgcactttcttatttgtcagttgactatggatgatgacttcagaatatcacaagtagatgtagatttgcgcttcggtttaacagcaaaactaggccagatccatgtcatgaatgtaattgccgttcaaactcacaggcatcaagaaccgaaactggcaactagatcaaagtatttgtctctagatttggattggccctccacggcaaactatttcaaactttagatgtatcaacacgagtacagttgcctcaactgtaaattctgtagagatatcaaatagctgttcagtatttcaccatcagctcgattcattttgatattattaaggatgtctgtgaatgctctgatgtgccttgccaaattcctcagcttctgcaatttagaaaggagattcaagtgactcatcccaaacatctccacttgcgtttgaagcatcttcaccatcttcttccatggccaatcttatatactctctccgagcaaaacgatcccagtctgtcaatgatggctcttcacgcatctgcagttgcatcaggaaataatatatcataaacacttatcagcatgacataatctgctaatattgtttgaattttatcagaatatgagtgggcaattgacttacttggcggatgaggaagggatctctagcttcaaaggccataaatttgttcaggttgaagagaatgttgaagaaatgcccagacagtttgcaccttcggaagtcttttaatgtaaaaaaggtctcattctgaaacaagaacaaattaaatatatcagcttaaaaagcctaagaacctagtaacagaatagaaatacagaaaaatgtttggttacctcaggtccaatcatatcaattagttgacacaagatgtcttcaaacagtacaggttcctgggccatgcattccatgcgatgaagttgctcctcaaaaaagaactgtagttcattatgtgtgagaatgccattgccatccacatctatacatctgaacctgaagagagattatgtgcagcacaaataagataaattgttagaatattcaacactcaagctcaaaagaagtgacaaataagagaagtgacattcatttgtcatttgaatgattagcatgaagggaactttggtgaagggaccattaataagaagtatgccatcttaaattggcagtgaaacaagtaccataggaacatgaagattcttttgatgaaggttactttggggggtttgtcctgtgactactttttagcctgaggtctaatagcatgcccaagttgcccagaaatgtttctgatgcttacataaggggcataaacttgaaaatcaaaacagcatagaagatgcataaacttgaaacaatttagattccgttcctatgtgatatacaacaggaactgagacagataaatgaacactctaatactagtgacaataattgaagtttgagcatcgcacggttaaggaataataacaaatagtagtaaaatcaacgtgacctaccaatattcctggcttggttctgatgacttatcctcttcagataatatgaaatgaacaaaatcttcatatcccatcttcccttcaaccttgctggtaaatttcctaggaacctattgtatatcaaatcaaattggtcaaaacaaactcaatgttatagttaatctgaagttggttagaaaaaaaataataccaacctctgagaaaattctatctacaatcctatatgtcaatgcatgatttccatacttaataagattttctttatcaatgaagaaatcatggtctgtgtccagctcccagaacttgcaatatatcacataaaaatgctcatatgagaaatacctatacaaaaatgagaaactttagtgccgcacttgttgtagagccccaaaaaaagagaataacaactataagagaggagagaagcaacaaagataatgtgaaaccaaatgctttaatgtctcactttaaaactttattaatatcctcttcatcatccgcatgtcgcagcgcatcaatcagatttccacgctttagctccctaagtataagatggccacctccaattcgactcaagcaataaaatatcctatatacgacagtctcagctggcaaacaatgctgtataagtagaagaaaaatacaagattggatttaatatttcagttgcatgatttcagtatgtcattgatagtttaccatatctttcttgaaattcaggtgtgctctttaggaactccaggccaggatggttatccagaaggtctcgaagaactggtttgaaatcctcctaagttattgtggaacaatagtaagacaaggacatcagcgatgaactatatgtgcgggacaccaaagagcgacacagtataaatttagttatatataagaataataggcacccaatttcgaattgaacaggattcaaacctaggcagtggggtgtataagcccacaccttgatttcctgaattaatccatctctgaaatattttaccatagacctatattttgatgaatgaggcatacctttgtgagaaaatcttgattcttttgctttaagattatgaatacttgggttgcaacgtccatagtcaccatattgctatttaaccagaaatcgatgaaggcatccctgaaaacaaataacataaaacaggatttaaccgggatttttttttgcaccctgcaaactagtgcaagtagccaagtagtcaactaccttgtgacaaatcctgtgttttccttatcaatcttcccaaaaagaacagtggtaaagaatgatggcagtttgcagagttccctagtgaccagccgaaactctattatagaacaaaaggagacagaaaagaatattagttgacagcatcactcacaaactgatctgatcaagatagttgacatcttggcacaaattcatttttttgtcttctacaagactatacaacatcacaaataattaacagaacatgttatgaaaatgaaagcgaatacggtcggatgaaaacacccaatgactaaatcaggatatgctagctccagcatccagacaccattaaattatttaattatgatcaattccaagaatcaatccattgttagaacgaaaagaatcaaggttagaacgaaaagaatgtctcagattggatttggagcagaccttgaatccggagaccattggagtgtccagcgaagagctgatcaacaatcgctatgcattgcttcttcagctcgtatgtgggtgggcgcccatcttgaaagtagaactgccaatcaaaatcaacattaacatttattttgaaataattagaattggctcatttcaacaacggcaatggcgattccatcggcgagagattgttgcgtggatttgatcgatggggatcgaggacgcgtacctggggtatgacttccttgacggcgcgggcggtggccggccggagcggggaggcggagcggttggactggccgccggtgcccacgccgctgggcctcctggagagccgcggcgacctcggcgagagcggcggcaccgcggcgcccccctgcatcatcatcgacggcagcatcgcggacccggggccgacggcggcgcccgccgcgccgccgcccccgcccccgcccccgcccccgccgctcgccttcgccttctgcaccaggcacccgaccagcgcgacggtgtccgggagggtcagccagtgcgcgaacagccggtcgagcaccacgctcagcgcgggcgccccgggcgccgggatctcaggcggcagctgcagcaggtccacctgcagcgccagcgcctccgccgcggcgctcagatccgccgcctccatccctcccctctcctctccctcgccgccgatccgatccggtcgaacgcgcggcgcggcgtggcgcggcgagagcgagctcggcgtggcgcgtggcgcgacgtggggagggagacgaggatggtttaacgcggcggcctcacgaatctcggcgcaatcccagccgtccgatccggtccatctgggctgcttcacggggtcaacggctttatatgcgatgcagggtggatcgccaacagatgcacatgatgtcaaaaactaaagcagcgagatgtgatggttcttgattcctagatctcgcctctttgatttttccttttctttttcaatgaaaattttcaattcttgtatgggcaactcatggatagagatgtgcatagtcaattctttgaaaaactatggtaactagtccaaatagactcgaagtttttgataattcattaccactaaacagacaaaacattatggcggatcaataattgtacttcttaattcacgttttatacagtaaaaaagttaacgagatcctcggaataatctcgtttcgataaaatgaaactgcattgttagaatcagatgaacaacaaatcaaaggacataccaattcaaatcttgatccagacgaagtacatcagtagagaaattagagatgctatgacaacgccttttgaatctctagcttttcatcaaacaaatggggagagaaagaagaggtacgtcaatggcacaagcccaaccataaatagagtagatctatggagagaaggatggggtaaatgggtggaagggaaaggatgggagaggaagtaggattcagcaccaccgtcaaactcgcaccatgcatggcatcatattgcatccatattaactcgtcagcttgtaatacaacataacaaataacacactgaggtataagttcaaattttagttcggaattccccttttactaaatatcaccgctgcgttagcacaagtatattactagtttattttagtatttaagattacgcctcactctagcttttcatgtgatgctttactccaaaattcaagaaaaaaaagggggtcatgtgaagcatccacatgcttcttttattcattcatatattttcaattcttaggaattttcatgcatataaattcttaattcagtacttttttcctttcttgcattttgaatgagaggcatagagggtcacacatatgaagattaatcgataaattggtagggatgcaagtggccgatccacaaacccacttataaataatttaaacctccatgaaaatgatttataagtggatttacgtgttagacctcttatgaaactgaacgtttgtttgtttgtttgtttgtttgtttgtttgttgttgttgttgttcttgtgaaatgaagcgtggtctctcacctcacttgttatggtcttgtggagaaggcaaaaatggccagtattagctgacaatagtgtgagaatgatttcagcccaagcccataagtaccttgcccagatgtaaacaattggcctacaatttttttttgacttaattggcctgcataatctttggcccaagatgtcttacttttgggttttggcaggattattatccagatgcacgcatattttggcttttaaaagttgatggcaggtgatgtgagctatataatatacagattaagattagacaaacatacatatatgcatgatgccacaaattatttccacatctctaatagctcccactacaaaagaataatcatacttaaccattgcctttgaacagtttaagaagtgcatatgcagagcagagatatggcctaacttggataaagatgagtggatattactaccggatatagaattaataggcgacaaatggtacatgcattgcatgtactactgcttaatttaacttgttgacactgttcatggactgatggacatcgaatcttgttcgaggggcacattggattgggaagtgctctttgttggtattctggattaagaaaaagcaaacgattcgctttgcaaatggtttgtaaaatagctttggacttttggagtatatatatctataaatatatgcacatatcctctgacttctatgccagcctgcaaacagttccactaattaaaaaaccttaatctgatcttattcttcgaatagaggaaaaattattcataggctcatggtagcttagagagtattctactgtctgtgtattgatcaaggaattgttacaaaacatcatctcaatttctaccattatatctcctctttccatctaaacaaacacccagacttgtacaaaccccacgaataaaaacatccacattgccactaccgtcctataccaccttgcccatatgtacaagtaatgcttatatggcttatcggttttttaatgtctggtttcatttctttactgtcttcgactacttgtgtttatcttttcgaagaaaatcggtcaaaacctatatataaaattttgaggtttcaacatggatgaaagcatagttcaaggtaaaattttgagtggtttacaagatattcaaatttgaaacagtaaattcgagcaaaatttggcaagaaaaacatcgtactagaggggggggggggttgagattcgacggtccatcgaaaaggtaaacatttctcgccctgtcgttcttctcatgtccaacaattctccagtctacactcaccatctctttccttcgcctcctaattctttctctcttcgtcggctctcatcgtcagatttattgttgtctcctctaaccttctaattaactagttttagccttactcacccataacaccattggctgaacggcttaaattcaccagtgactctagcaacaacaacactttcgacggccgataacaattctcagtcaacaccatggctcctccagatctagcaatttcttttcctcctacccctaaccccctcttctccaccctacctctataacaaccatcaccccaaaccctaactccatcgagcacttattaccttcctctttagagaggtggtggtcgaattataaatctacgagcagttaatctaaaatttaagaatttgtaaattaaataagagcttaatagagtacaacatttttcttaatgaaagcaatacaaacacaacattatatgatccgatccatttcatggaaactacggttggcaaaaactttgtgcgctgcctgcaaaaaaaaaaaaaaaaacaaccagtttattgggattaggaatttcggatgggaacggggcgagatagtgctcagtgactcggtagtcatcactaggccgcgacagcatgcagattgctttaatttcattctctttataaagcaaaagagaaagaaaccaatcaaagcatgccacgcgtcactgtcaagatcactgatcactaaccgatgataaatcattaattaatctccaagttaatccccaaatttggttaattaaacactcttaattcttcacaaaacagtagctaattagaaaaaaaattaagatccggtaattcatcctctcattagcaggaaattatgttacaagattagcatatatatttgcaggtagcaattagcattgcttcatatgccgtgaaattaataggagaaaactctgacaaaatcgttagctccttgatcacatgtagcttgaaacatccacgcatggcggcgccggcgagccactacacggcggcgccgttcttgacgccggcgtacgtattacggctgcggcggggccaccacctttggtgctggcgcgagtggcacgccggtggcggcggcggcggcgaaggcgagcggggtggcgctggcgaggaacgacggcgagtcgtcgccggccatcacgaccaccaccctgggcggcgcctccctgtccagcggcgccagcacgcgcaccgacatcatccccggcgggacgacgacgtcgccgcgctcctcgccgccgacgccgcgccccccgtccttccgccgcgtgcacagcagcacggcgagcgccaccgcgatgagcgccatcaccaccccgaacccgatgaacaggtacggcgtcggcgtcgaccagaacggcggcggcgccaccgccgccggcatcgccggcaccgacgacgtcgacgccgccgcgccgccgatcccgcccatcgccatgtcagccgctccagccggcctcatttgcaagaaattaaaccaaattaatcctctcgccttgatcaatctcagctaagcttaagctaatcagctagtgtggtgtgatgtgaggcaactgagctgagctggttggtttatataggggaggaggaagaggatgcatgggagtgggtcacactgtcatcacactgtggctgggctaaactgtgtgctgtgctgtgctgctcccaggttaatctctaattaatttgtggccactagtaatttaatttgatttgatttgattggttgattagttaattggactgatgatggttaatcagatggatttggtgttttaattaatttggtatggaagagagatttgtggttttgctttttgaggggagtggaggatcagggagctgatttgcttgcaactagtctggttgtatatggtttgatgtgtgattttgtagggctttatttgttctggccttgtgggtgcatatatggataggattgtgcctagtttttcttcgaagggatctagataaaaaaacttgataggggttgtttgtattctcgctttctcttctttaatgaaattggcagagctcctgctcttccctaaaaaaaattgtacatttgtactatgttaattacttgtatacatggatagtatggcagctgggtatactaatttgaagcttgcttttgtctctttgtaatttgtatatatatatatatatatatatatatatatatatatatatatatatatatatatatatatatatatatatatatatatattctaaaatcacatccagctagctatatatattcagtgggtcttggctaattaatttcatggtttaatttatcattgtactttgaggaaatcagttaattaacaattttgatagcacaaaggacccatttgatttggagcggattaattatctatgggacatataaatatttcaagaaataagcgtaacagacaatttttaaataaaagtagtttatgcaacacaataaaaaacatatatttttaaaatatgaagcaaataacaatccggtgaaagcttaaaaactgccccgtcgttgctggacaatagacaggtagtttcaggcaaaatgcatccaataattcacatctgtggatatacacagagaggcagctagagatcagagctgtgatatttcaaggcaggcaagtcaagtcaggaaaaataaatctttttccagacacacacacgtagacgatcgtcatcaactatcggcatatcccaagatggagctgggttacatgcaagcacgcactagcaaacagcattagcaagcaatgcaaagctcatcagccgaaagcactgtgaaagggataagagcaagctaattaagctctcttcgtcgttaaagtggcactactaattaaccctgacaatagatgatcgaatgatcgatgatatatattaatatatgccatatacttaaccctagctaatggtcttccaaaagagaatattaggcagagcctcgacctgatctagtaggtaagtataccagtagtcaaaagttaacgatcgtaagacttcttttgatcaggtctcttcctcgttctgtggctttatcagcaatgaaatttcgcgtacgtgattgggagaggacaaattaaagcgtatgtaggtgtgtttggtaaggaatgaaaaccttttgcattctctcacacctacatactcctatatgctagcagctacctacactttgttctctctaatatggtctggtttagttcccaatttttttttcaaacttttaacttttttatcacatcaaaactttcctacatacataaactttcaacttttccgtcacatcgttccaatttcaatcaaactttcaattttaacgtgaactagacacaccctatatggtcgtcctctttccgactcccttcccatcgtgcacaatggtttgaaatctccccccgaaattatcagtttttttttcaaatatttatgaatttagcactgaaattttggtggctaccgaaattgtaaaccttgctgtgtacacactaaaaaagactagaaaaaaagagagaaaaaacagttgatattaattgcgcgctccgcattaaaaaacaaaaaaatttcctaaaaagaaacagcaataaaaaggaaaagtatctagataaataaatcatcgatttatgctagatccacttcctagcttagccttttttaatagctagtgtgagtccattgtaatgtacggggcatcttactagtgtcgtagagagagagagagagtgtatatatatatatatatatatatatgtacatacactggtggagaaaccatctttggtcggttggccaaatttcacaatagtcccagttctaataaaaaccgggactaaaaagcatctttagtcccggttgaaaagttgaggtgtacttttttatctttaatcccggttggtaacaccaaccgggactaaagatcatttttagtcccggttcaaaaagttgtcgggttccagacagatccccattatttttactcccggttggtataaataaccgggactaaaaatagatctttagtcccggttgtttataccaaccgggagcaaagactatcccgagagccgcgcgcgatctcctctcgatctcctcccctctcattaatatctctttcaccccctcttcctctccccttcatccccttcctctccacttcccctgccgttcctccccttcccctcgatctggagcggcggccggccgggcggtagcggcggcactaggcaggagcggcggcgcccgacgcgagcggcggcggtggccgggcgggcgtgcgcggcggcaagccgggcgggagccgtggcggcggccgggcgggcgggcctggcggcaagccgggcggtagcagcggcgcccggcaggagccgcggcggcgggcgggcgtggcggccgagctggcgcagacgccgagaggacggggaccgagaggccggcggcgccctcccatctgctgccgatttttttttttgattttgtgtttcattggatttgatctgtgatgtatgtgatattggatctgatctgggatgtatttgagttgtgatgcatttcttttaggatttgtgatgtatttttcgtttgagatttggtgatgtgatgtatttgtgatctgtgatgtatttctttgcaatatgtgatgtatttcttcccaaatctgtgatgcttgtggatgatttgggatatttagggagcaaatcgattgagcaatgaaacaacaacaaaaaaaaaaagaatcaaccgggactgctccaccatttttagtcccggttggtaataccaaccgggaataaagatggatttttagtcccggttatttcacccgggactaaagatgggtatctttagtcccggattcgtactcccggttgtataaccgggactataggggggtttataaccgggagtaaaggccctttctctaccagtgatatatatatatatatatatatatatatatatatatatatatatatatatatatatatatatatatatatatatatatatatatatatcatactgtcttgcgacaattgactcttctagattgctagctagcatcctccatcacaaaattactcgcgatatatatacattaatagattgatcgtctgttgtatgactgataagccgcaaaaaataaacaaatcaagaaaaaatatttactgttaaatctttcgtatctatatatattctcaccgatttaaaaaccaatgaaaaaaataaaaaaagcttaaaaacaactctaaatttaagttttaaaatttaaattttggcttcggctaaaaagccaataaacaaagatgagaggcataacgaacacattttaaacagtaacatacgttggtcaaaattaacaaacacaatagtcaccaacatttgtttcctgttgtgggtataaaagtaaacaattaagttggttctaactttcaaacttataagggtcttagacaaggagatcaattatctccaattctttttaatatagtcattgatatgcttactatattaattaagaggtccaaggatgatggtcaaattagtgggattattccacacttggtggatgatagtctttcaattttccaatatgcagatgatactcttattttttttattttttttagaacatgatctactacaaaccaaaaatctaaaattgttactatcgacttttgaaaaattatctggccttaaaattaattttcataaaagtgaattattttgttttgctcaggcaaaggaatgtcaagagctttattctactatttttggttataagcttgggaattttcctatgagatatcttggtattcctatacattttagaaaatttagtaacaaggattggaaaacaggtgaggaaagaattgaaaagaaactcagtagctggaaaggtaaacatatgtcagttggggggaggttggtgttaattaattctgtgctttctagtttagccatgtttatgatttctttttttgagatttcaaaaggagttctttgaaaaattgattattatagatcacgtttcttttggcaaggagataagcacaagaagaagtataggcttactagatgggatattatttgtcaacccaaagatcagggtggtcttggagttcataatcttgaaattcaaaatcaatgtcttttgggtaaatggttgtttaggctcataaatgagcagggcgtgtagcatgatctattgaaaatgaaatatctttatagtcaaaccttaagttgggttgagaagaaataaggggattcccattttcgtctggtcttatgaaagttaagagtaagtttttatatatggattcctagattgtgaataatggtgtacaagtgagattttgggaggataaatgggtagggaattattcttttaaagataggtatccgtcattatatgctatagttcgtagaaggaatgcttcaattgcaaatgttatgtcttctgttccactgaatgtttcttttaggagagctttagtatgatagaatttaaacaattggcataatttatgtgcttcaattgttcatattcatttgtcagaggagaatgatatttttagatgaaattttcatcaaaatggtgtattctcggtttggtttatgtacgtagctttaattaataatggcaacattgagaggaataagattatatggagacttaagatgcctctcaagattaagatttttacgtggcacctacttaaaggggttgttctaacaaagaacaacttagttaggagaaattggcatggtagtttaaaatgttgtttttgcatgagaaatgagactattcaacatttgtttgtggagtgtcactgtgcaaaatttctttggagagctctgcagtttactactggtttatatactcatcatagtatatctcatattttttagaattggcttgtgggagttgataaaaaatttaccaaacttattcttgttggagcatctgctacatgttgggttatatggttgtgtagaaatgatatggtttttgataaatcaccatctatgtcatatatgcagattcttttcagggcaacatactggctccggttttgggcttaactactaaagtgtgatgaagaaatcaagccagtgaaagctgcatgtcgtaatcttgagtcaatggttatgtagctgtttgctaactttggatggagattcacaaatagaattcaataatttttgtgatatttttatgctgcatgattttttattagtttgtatgtgcttttatttattcaggtgtgagtttttgttgagttggtataataattggctgtagctctttgagcaaaggccgatcgagattatattccattatctaaaaatcataacgtgttttgataactgatcgatcgatcacaattctatccaaattggataattttatcaagaaagctaagggccccccatccatggaccatgcatgctactagctagctatagaaccttctgctatatatacaaattcagagcttcaggcttcttcctatctagctagtggtagacagcatccaacactatcatgtatgctgacgatggttgacatggtttgcgtgtacttgtgcactaattaaacaacacacaccaactacacacacatatactttctctgttctaatatatatatatatatatatatatatatatatatatatatatatatatatatatatatattaaatttgtttggtgctccatggtgcccgggcaccattgttgaaattgagtatatacccaattcaaatgactatgaaactttttcaattacttaggtattaacattaactactttactaactagttcaaagcaagtttgaactgaatttgaacttgtttttgttagattttgattataggtatatagcatccatatatataattagttagatatgtaatcatggattgtgaaataaagttaaatctgagttgttttgttgataagtataggtatgaatcgaattattataactaggtatatactcacaatttgaaaattttgagtgattttgtgcattagataccatggtgcccgggcaccatggtgccccatatgagtgtcctatatatatatatatatatatatttatttatttatttctaaagtttaaatttattccaaactataactatttttttcatctatcatctcgatcatctcaaccatttctcatttaatttattcatcaattttttccctcttaattaaccgattacagacttcaattcaaccattcaattttaactatttttttaatctcacaaaaatatcttaaaaaaacttacattttagaacggacgaagagagagtactaacatttttttgtgcgtaacataatgcaggtcgtcgtcgatgcttcttcgctgtgtgtatatatggtttggtagcagcattacagcaacagttagctagtgggagcaataattcctcttcttttaatttttctctcctcctttttggttggttattggcgcaacaactcgaggcagtagtgcatggatgcacctgcggttctccacgatcccagcaaccgtcttaggtcaggtcatccaattatccaactacatatatctctatccaagtgcacatgcatttcaatggtgtgttgtgtgtatatatatggtttaaatcgggtaatcctacaaattaatttatcatgtttcaggcatggcctacatgtatgtgagtatgtgacgcacatttcaaatttcgatgatgctccctctggtctcaaatacctttcactggatacaattcaccttttagctttgacctttttttcccccaagatatttatatatactcaaaagtatgccatattagcgatcaatatgtattgtgtcatacatacaagtggacaattttcattaattataaactaattgattaaaagtactctttatttggaaaggggagaatttaactatctgctgctctctcataaacaaccactctctttttgtgtttgttgttacaaatttgtcattgaagagagaacatttcctacctattcgccacggaggaggtttctaagttagagggacatgtgtcgctaacatatgggtcatgagggtggctccacctgtcagggacccattaagttagaggagctccttcaatttttcactcccacattgcggtatgcatggactgaggatacgaaataccctttttgcccctatccggccacctatcccgctctctctctcttttgcgcacggccatggcatcctggccatcggcgccggccgacagtctgtcaccgctatattcctcgccgatgagaaccctagcacactagcgacgcccatcctatcaccgggtgctagtcaagtccaccatgctcgtaaacaagaacggggccttggagaagttcatgtgcagtgggtcactggcacaaattaaagggggaaggtgaacattttgcatctgccatatatccacgctgccaatctaaccctaccatgcatgccacatagaaaaactgacaaaaatgaaaacggagaagcttctctctgtggtgacaaaaacgtaaagattgatcagataaatggctgattcaacattggcaaataataaatagttgaattcccaggagggaaaggcatactctccctattccctaactagtgatatatcttggatatgattacgtgcgtgataactttcagctaatgctgggaaaaactgcggcgaaggcacacaataacaggtgcatatgagctagtagctaggtatagcagctgaatgatatgatggcaacttttgacgacccctgcctgcttgcgatctgacgcaacacgcatcttgttcgccaccatctctccatatatggctttccccctcttcctttccccaaatgggaccgatccttcgatccaatggaaagagtcactcagttagtctcagttgctagcttattattagctcgtggataacgatggattagatatatcatatatggttacactactacataatattcaatacgtaccaattgaaaatcctatataggtgtcggattttttaaccgacatcccattaaactttgaggttttaggagtaaaaaaaagttagctcgatgtatcggctcgaattgagctgatgcttcgagctaattaagagctgaatcgtagaaacaacaattctatatatagatgaagaacatatcagaaacaacatctgcgaatcaagaacatccacaactcaggaaaaaataaatcaagaaaatacaaaatcaaatctccgtcagccatgctcaccggctcaccgccacaccaccgccgtcacccgagccggaaaggggaggagaagctgccatgaaagactggtcgtcagctcgctcaaccttccgatgcactcgatgacatcaaggggaggccatcacccttttggtcatgatagaggatagatctagccatcattgcactcgtggcagccgtatctagccaccttgagccacacccaaatctagtcgtgcctaaccttgtgacccccctcccccatgtgagaacaggccgccaccatattggaaaggtcagggggagcctgctatcgagggaggtgagggggtcacccttggtgtacaatcgttgcctacactcagcgtcacaaaggaacacacctagagcttgagtggtgatcgatggatccaaccatcacgagctcgaggcccgcgctaagaggtgagagagatggcgctgcagatggattcggtcagtgagaaagttggcgtgcggggataggacgaggcactccgagaggaggcggaggaggaggaggaggaactgcagatgagatgatgtcacgcccgaaaattcactagtaatttccgaacttatttgtgcataaaatcctcgtccaggaatcagccgaggtacacaaactgacaatttaatatacagattcatccaattaactaaaacgataaatacttacttaagaggcacttagtcctcaccatgaagaaaactacagcggaaaataaaatctagcgaagctccggctccactcccacaggcagctccactggggtataaaccaaacgtcttctccttctggatcctttttcttcaactgaggttgattgattattgcaagaatgagcatatgacatactcaacaagccacacagcaaatatgcaagtgcacaaggataccaaaggatggcataatatagtctcatttgcgaaagcagcatttagcaaagagttaagagtagtaaaacagtagagtaattaatcagaaattttaatcaacactgaacagcacacccatgctgcacaggcccaaccatcctgaacaaccatacccggctgtacagatctaactccaagccaggagctaagcaaattattaccaggtataacatctataattattgtgagaggtgtgagactaatcacgaaaaacattgctcaacccgcccataaccgcgggcacggctattcgaatagttttactctggccagaggtgtaccactgtacccacaagacacagccccacaacatgtcaccatgtgcctcaataccaccacggtacctcggaaaggagctgtgacaataccccttgcacaacacaatccaccacagcgcacctttcctggatcataatcacccccttataaacaaggcatggactccccagcgacccccgtgggcttatcttcgccacttctcagtctggtgctccgcaatgaatcatgctatacaaaaggtaaagccgttgcccacgctggcttgtggttggcacggttaatgtttcacaacagtagctcgcgaaccggtccttaattgtcatgagcacgactctcaaaaccatgtgctcacaacccaccattatcaagttttagttggcaagtaattaattaaccaatcacgattgaccatcgtgaactaacaataagccatcattaaataatagtgaatcataagttatcccaatagtgtgctaatgtttctaagcatggctaagcaatcacatctaatatctagctgaactaatatatatagcccaactagtcaagttataaaaacccaaggtatcaaggaataaagtaatcaagaacaaaaagggctataacaaacaataggttaattccacccaatgacattcgaaaataaatacaatagttgaatagaaacaatagctttaaacgggatcaacatgctcaaagggttgtttgggatctgtgtgacttgccttgctggccttggaactcttcaaattctcctcctgcgaaaacggactctccagaaacgtcggaatctaaacagaaaagagcaaaaacaccaaaacagcacataaacaagcatgaacagtacatgtaggtatttttaacatgtagatctcaattttagaaaaatttagagacttgaaccaactaaatccgagctaagatgaattagttatgaatttttaaagattaaatcggattaaaacacttatatggattttaattgaattatgacgcaataatgaattatttttgaaaaggaaaagggaattattgcgtcagcggctagggtttgcggtggaccgggcgcacggcgacggttcacgggaacggacggccgagatcgatccatccaaaacggacggccgagatcgatcggtccacgaccggctcacgggagagggcgacgatgacgtcggcgatgacgtcagcaccggcggcggctcgggcggcgcaagctcgccggcgaacgacggcgcgacgacgcaaacggaggacaccaacgggtagagggcgactcggcgaactcaccggtgaccaaaacaacggcggaaaagcaatggacggcgccggcgacgaggaagaagcggcgacggtcttcaggtcgacggtgacggcggtgctccggcggtcttcggcggcggcgaagcggcggacgaggacggcggcgacttggcgaccacgatgacgaccttcccgagcgacagcgacgactggaacggcggcggcgcacagctggagcgacggcggcgacggcggcacaaggctacacggggctagggctctatcggcaacgagaggcgaaggcgagggtggcgacgggtagcggcgacaccggggtccttttataggggcaaggaggcggcggcgaaggcccatggcggccggcgacgagatggaaaggtcgggctcggagagagaaaagccgatccgattcgacttcgaatcaaacactttccaagccaatttagccgatatttccaaaggggaaaaggtagaggagatcccgaggatcatttctcctctatcaattcggccggagaaggaaaggatcgaccggatttggaaggaaacggcggcggcgcggcgctagggtttcgggcggcggcggccggaggtagacgacgggtccgacaggtgggacccacctgtcagcgacagcggcactcgcgcgggcggctgcggctgcggactgggcctactgggccgagggagagagagagaggggggtttttgggccgactttcggcccaaagccaaaagagacttttaaaaacctttttcaatttaaattattcatgaaatacaattctatttattaaaaatacttccttagctcaaataaatcccagaaaaatctaggaattatagaattaagcaaagtatttaacaaaattttatctagcccaattttatattgagatttaacaaattaaaattagatcttctcttttaagatcatttctaattattccttttaagcaacaatttataatttaaggatttttaaacaagaaaagctcttaacaattataattagatcattattgatcaaataattactgaactgttctttgtatcatttaggaattgagctctgaaaaatccgagaaaatttcagagagttgacttaatcatggagaatttaataaaaattaaatccatccatgctttatatttggaaaattttatttcccacatttaacttcacttgtaaattaaagatcatttaatataaattctaataataatttattaaataatttataaatcctgaaacaaaaatcaggatgtgacagatgaggactagcggcgacaacaacaaggagggctagggaaagagtgaaaggtgggagaggcgaggaggacaatatagagagagttttggggttggagatagaaagaccaggcttggcttggtgatcagctcgactctgtacctaaaagtgtcttttttttaaaaaaaaaaacaacacctataaccttctcaggagcactggtttttttaataaactggcactaataagaggttatatggatcgggttttagttttagatccatctaagcagggaaggagagtgagaaaaggctcctatgtatagatggcctaaggcctgaggcctgacggcctggccatttggcccgacccaagcacggtacggcccgactggtgtcggggtcgtgcctgggccaatgctttggcacggacaaatgaaaatagtaggggatccaaaatagacttaattcagccatataaggcaagacccgaagagattgagggatacaaaatagacttatttccagccatataagacacaacccaaagagttgagggagaaaaaatagacttattttatgaaaagcgcgatgggttgtcgtgattttgggccagcccagcacggcccgagtcttattggaccatacttggatcgtggtgacgtgagtgatcacctggcaattaatcacggtgaaggacaggcaattaatcaccatacttggatcgtggtgacgtgagtgattagcaaattagcatgccgtgtcatttcaggcgtgctgatgacgagctaattttacaacaccaggcatttttcgtgggactacccaaaaactatcacaagctttttttaggtgaaatattttaaatatagttatagtataattaaaatataattatattgtaaaaatatactacctccgtttcaggtcataagactttctagcattgcccgcattcatatagatgttaataaatataggcacacatatatgtctagattcattaacatatatatgaatgtgggcaatgttataaagttatataatatgaaacggaggaagtagttataatgtattcttttgaaaaaatagagttattatagcgtaacttacatataactcgcatataattgtgctgaaacatgtttatgctggattggctagcatcatgatctctaatgagatcgtgagttcgactcactaatgcactgctgtgaaaagaacatcctttacacgaatctcgaggaatcattgttaaaattgtaagcacataataatttaatttattccataaataaatcatgacattgcagatgtaattagattgaacgtatcattagatctacacatataaactaagcggtaaaacatgaacagatcaaatatgcgcaacatgtcgaacacgtaccgaggtggcggaaagaccggttgctcggcaggaactactcgcggttgcgagcgtcgacgaaggcgcaaagcacgcgagcggagaggaaggcgagccgtcgcagatgaacagggagcagtcgcgcgaagcgcttcccaaaaaccttattgccgccttctcccggtgcaggacgttgaaggcagaggttccggagacctgctttcccgatcaccggtgcacgtcggcgagcgggatggagtagtctacgagcgacggcgcagcacagagtaggaggcaaaccctagattgatttcgcgtgtgttgcgtgaaagcggcggctcggtttatatagagatagatcgcctgatcagggcgcccgcataaaccgaaccggataagtcgcgcataacctatccggactccatgccgttttcacgcaccggattttttggaatgtttccaaaacaaaacaaatctgaatttcccgcagcaaaacaaaactgtaaaaggaggctgcatctgcgtaagggtgaggagccaattttgcggaccatttgatgcgtacgtcgtgcacgcgcgccgcctgccctgcccagccaggccaggccagccgagcgagcgcgcgcgtgtgtttcccctcttctctccaccacacatgcttcaagtggctaggagggcatcctcccttttaaggaggtccccctctcctagaataagcaaggtagtactaaactccacatgcatgccatctcatgaggtggcttttgtgattttccaaagaattaatcttcgaatgggccttagcccatctattaattccaacaatcccccaccaaatctcaaaatcccaatgagatttgccttttccaatgtactgtttatataccagcggttcgatggagaccgattaaggttgaacatccacctagaactccaagttacacttactcacaacttgaacaatggactacgccttgaattgcaagtcttgtgcaagcaagtttcactcagagtcttatctggtactagaccgtctgtagactacccctcggatggagcgtataagtcatacttctaggtctttagtaagcttcctagaagattcacccaaaatctctatagactgcgaccaacagtcaagcttacaaaggtgagttctttcaagaatgctctgcaggacagtatcttcgctaattaaagccaacagaactcattaagtcatagccaacctgccttgcagctcatgagagtacatgcatcttcacttagagagggtatagattggtactctcctctagtttactaatggtttgttcttcccaggttctaattcacgggatctccgatcacatagactgggttaccaccatagtataactcacatgggtctcaaacccatctccttcgatgcattatctatcacatttcgtgatagtcccttcgtgaagggatctgccaggtttctagctgtttggatgtaatccaacgttataattccggagtttctcaatttcctgatagacttcaatcgtcttttcacatgtctagacgatttcatattatccttagaactattcactttgacaattaccgtttgattgtcacagttcataaggatagccggcaccggcttttcaacaataggcagatccattaatagatcacgcagccattctgcctcaacagtagtagtatccagtgccgttagttttgcttccatggttgacctcatcaaaatggtctctttgatctcatccacatcagagatccagttagaatcactataaccctccagcaccgcaggatacccagtatagtgaagccccaattccatactacctttcagatagcgcattactcgctcaagcgcacgccagtgatcatctcctggattagaggtaaaccggctcaacttgctcacagcaaaggagatattaggcctagttgcactagccaggtacatcagcgagccaatgatttgggagtatttcagttgattcctagcaattcttttgttcttgcgaagcaacaagctaggatcataaggtgttggagaaggcttactatatatcaatgtagccaaagcgattcaagatcttctccacataatgggactacaagagtgtaatctcattctcacctctaattagcttaatgtttaagataacatcagctactcccaaatccttcatatcaaaattttgagacaagaatgacttaacttcatttatcacctcaaggtttgtcctaaatatcagtatgtcatcaacatacaagcacagaataactccctcacccccaccatggcgatagtacacacatttatctgcctcattgactgcaaagcctgcagatgtcaatgttttgtcaaatttctcatgccattgcttaggagcttgtttcagaccatacaaagacttcaacaatttgcacactttgtcttcttgaccttcaactacaaacccatcaggttgatgcatatagatctcctcatccagctctccattaagaaaagctgtcttaacgtccatttgatgaacgagaagaccatgtgaggctgctagggaaagtagcacacgaattgtggtcaatctagcaacaggtgagtaagtgtcaaagaaatcttcgccttctttctgagtaaagcccttagcaacaagccgagccttgtacttttcaatagtattgtcaggcctaagcttcttctttaacatccacttgcaccccacaggtttacacacatagggtcgctctgtcacctctcaagtcccgttagcgataatggaatccatttcactacggacagcctccttctagtagtctgcatcaggagatgcatatgcttctgaaattgacttaggagtgtcatccacgaggtacatagtgaaatcatcaccaaaggacttagccgttctttgtctcttactccttcgaggagcttcactgacatcctcctcagtgacatgttcatgtgtatgttcagtttgttctggtggtgtgattgaactgggaattacttcagagggttggctcgaactactatgtgtatccttcattgggaaaaagctctcaaagaaggtagcatcacgagactccataattgtaccaacatgcatgtcaggtacctcggatttaactattaaaaatctataggcaatgctgtgatgagcatatcccagaaagacacagtccacagtcttaggtccaagtttgcgcttcttcgttattggtacattgactttcgccaagcacccccatgtgcgcaaataagaaagtgatggttttctcccaatccatatctcatatggtgttttgtccttatttctgttaggaactctgtttaacacatgattcgaagtcaacaatgcctccccccaccatgccttaggtagtcccgccgtgtccaacatggcattcaccaagtcagtcaatgtgcggttcttcctttcagcaatcccattagactcgggagaatagggaggcgtcctctcatgtatgatgccatgttcctcatagaataagtcaaactcatttgagaaaaactctccaccacgatcagacttaagccattttatctttctgtcaagttgattttcaacttctgccttataaattttaaaatagtctagagcctcgtctttcgttttcaacaagtacacatagcaaaatctagtagcatcatcaatcaacgtcatgaaatatcgttttccacccttcgtcaacaccccattcatttcacaaagatctgaatgtaggagttctagtggtgccaagtttctctcctcggcagccttgtgaggcatgcgaggttgcttcgattgcacacaactatggcacttagaacctttgaaaatggaaaacttaggaattaaacacatgctggaaagccgagacatcaagccaaaattaatatgacataaacgtgagtgccaaacattagcctcatcatccacactgccacaaatatggttcacagacttattgcagaaatcagaaagggaaaagcggaacaggcctccgcactcataacctttaccaataaaatatccatgtttagacacgactactttattagactcaaaaaccaacttaaatccgtctctagtcagacgggagccactaacaagattcctgtcgatagaagggacatgctgcacgttcttcagctacacgatctttcccgaagtaaacttcagatctaccgtgccaacaccattaacagaagcatgtgacctattccccattaggacggtggaaccccgtgcgacctgataagaagaaaacaatgagatgtcagcacaaacatgtacattggccccagtatcaacccaccaattagtagattgattaactgaaaaaacagtaggtaaattaccatacccgcttccatctccagtattgccaatggtcacattagcagacttagaagtctgccctgcaggtgccttcatccccttgcgctgtggatacttcctagccagatgaccaggttgcccacacacaaagcaagtcctctcatcctggttaggattgatgttgttcttcttctgcttcttgaagttggtggtctgttgagctttgtatttccccttgctcttgttctgggccttgtgcacaacattggcactggactgcccaccatcgccctgagacgcggcgtctttttcccgagctttctcctcaacatcaagagacgctatcaacccctcaacggagtattccggtctcttgtgtttgagtgcagtaccgaaacttctccatgatggaggtagtttcgcaataatgcacccggccacaaatttatcgggtaagacacacttaaggagttcgagttcgttagccatggtttgtatctcatgagcctgttcgactacagaacggttgtcagccatcttgtagtcatgaaactgctccatgatatacagatcattgctagcatcagtagcaccgaatttagtattcagtgcatcccacaactccttagcgtcggtcatatgcatatacacctcgaccagacgatcgccaagaacgctaagaatgcatcccacaaagagagtagtggcttcctcgaattgcttctgctgatcagcagtaagaattccttcaggtttgccattactcacccagaagcatttcatagccgtcagccacagagtgaccctgatctgccatctcttaaagtgcacaccggtgaatttatccaacctcagtgcatcggcaaaaccagccatagtaaaatcacagcgcctataataaggtttttggattgttgaaattataagcacataatgatttaatttattccataaataaatcatgacattgcagatgtaaactagattgaacacatcattagatctacacatataaactaagcagtaaaacatgaacagatcaaatatgcgcaacatgtcgaacacgtaccaaggtggcggaaagaccggttgctcggcaggaactactcgcggttgcgagcgtcgacgaaggcgcgaagcacgcgagcggagaggaaggcgagccgtcgcggacgaacagggagcagtcgcgcaaagcgcttcccaaaaaccttattgccgccttctcccggtgcaggacgtcgaaggcagaggttccggagacttgctctaccgatcgccggtgcacgccggtgagcgggatggagtagtctacgagcgatggcgcagcacagagtaggaggcaaaccctagattgatttcgcgtgtgttgcgtgaaggtggcggctcggtttatatagagatagatcgcctgatcagggcgcccgcgtaaaccgaaccggataagtcgcgcgtaacctatccggactccatgccgttttcacgcaccggattttttggagtgtttccaaaacaaaacaaattcgaatttcccgcagcaaaacaaaactgcaaaaggaggctgcatctgcgtaagggtgaggagccaattttgcggaccattcgacgcgtacgtcgtgcacgcgcgccgcctgccaggccaggcgagcgagctcgcgcgtgtgtttcccctcttctctccaccacacatgcttcaagtggctaggagggcatcctcccttttaaggagatcccctctcctagaataagcaaggtagtactaaaccccatatgcatgccatcccatgaggtgggcttttgtgattttccaaagaattaatcttcgaatgggccttagcccatctattaattccaatatcatgaatttgaaagttttgaggagaaaatactgacgttccctttttttaagtaattccatttttgcgttacaaacggtcaaaacggcattgatgacttcatttacttatcaacaacccatggactcaggatgcaagcgggctgactcatgaactcacttataagtcaaataagtaatcatccatggattttcacgtcaggatctagcttggcacatctattataagtggatcaacctataaacatatttataggttaacttagtaggtaatccgcgagccaaatcacgagttacccgctaaattttgcctataaacgtgtccacgggttggcacaggcacatccctagaatggaccgaacatattcagtgataatcaacagaattcagatctcctttttctatagtgcatgatatccggttgccataacaaatagagcaattctacggtacttgaggaggtaccatgagatatcaaaagtttagtgtaaaatttggtacctcatagtatctaggtaccaagaggtaccaaatttacaatagaaaaaatggtacctcatggtaccttctcaagaaccgtaaaattgctcaacaaatagtacaaattttgtgtatcaattagaatcccaatgaatttgggacgctcctgatctatgcctggatttctggagctatgaagaggcctgaaccttctaaatttggggcatcagctcttgccatcctcaaattcgccaaaccagtgtcttccttgttatcgatgttgaggaactttgagcttggcccatgaagacctggcccaaatacacttatttggcacaaaccttctatatttgggattgcactatataaaaaaaaggtggctagtcatttgtatactttgtgtctccacttctcttcttagattatacaacctcattagactactttgtagccggggttgtataatacattatcaacgcgaagctctactggagatgaaagtagaaaaaggataagaaacttgaagatttgttttgcatcttgtagattgaattgcaaaaacaaatcccttgtatcttccttgtttcctttttttttttactcccgacgaaaaccaccattgctgacatggagtcgtcggcgctctccaacagcagcgaggcatccttcgtccgggacgtttttgcgagcaaaaaaaaaaaagaaagaaagaaagaaagaaagaaaaactgaaatagatgcatgttgcggcccgttaggtagaaggccgggtcacgagcagcagcgcggcctagtagctgccgccaagcctctcggtgagaatccatgggccgcttcggggtggttgtggtagtaagttcacttttggtccctcatcttgagggcgggtttgaaaaccttccttgaacgataatactccctccattccataatataaaacacaacctttttctagatgttccataatataaagcatggatgtatgtaggcaattaactatgacctcttctccattaaattattacttttttaaattctccactctcatattctctaattctattggatgcatgcattatatttattagcatgatccaaactataagatgataataattattttcttggtctttaggttaggggtgattaaaccttatattttggaatgtagggagtagcagataaaatgtgtctctaatattgcaagatcaggttaaacagggtatcaagacagtatagctccttgtttcgtctgacgtgacgctttgaccgtggtctgctttgctgagtcaacgtagcttactgtggggctgtgtttgaaatcatcttctccccccccccccctcttcctgtttctctatcttcccccacaatggagcgatggtggcgcccggagcagtgcatcagcgaggagagcggcgtcgtgttgggtttagtcccacatcgataattgatgatgggggagcatgacttaaaaggtgaggacagtccttatctctcatactagtcttttgggttatgtaggcccaggacctaaagttgtgactccggttgggcttgtggtggagcaggcccaatgtgacctaggtggcccatggttggtgggccaggctgcacactctaacaaagtggtatcagagcctaggtttggaagccggaacaattaccttgggtcacatggtagggaggccaggtaacaagttttcacggtcatatgggttgaggtgacgggggagattgttggggccaggtaacaagttttcacagtcatatgggttgaggtgacgggtgagattgttgggcccgatgtgtgcaaggaaggcgcaaaaggccttgtcggaggcaacaacgaagtcgtgtgatcaagttcgatggtggacgtggaggccacgcggagcggagtcgcaaaggtggcacggctcactaggtcatgcaaatgtggcgtcgagccaggttcgatggtggacgtgaaggccacgcggagcggagtcgcaagggtggcacggctcgcgccaggtcatgcaaaggtggcgacggttcgatggtcgacatggaggctacgcggagcggagtcgaagggtggcacggctcgccaggtcatgcaaaggtggtgacacctcgacgaaggagccacgacctgggcttggagaaatgattgaatgatttgaattgaaatattatgaaaatgatttgagaatgataatttagtgctagatgtttgttgcggcatatatgttagatattggagaaatgatgaaatgatttgaatagaaagttttagaatgtaataaattgtaatataattaaaatatgcttgtatattaagctttgtatgcttaatgggttaacgtcgcatgcttgcatgtaggttttgaaagtgctactaaatattatgtttgtatgtttagctttagatgtttagtgagtattagctttatctttataataagaaaggattacaagttaaaaggacatgtcgttatatatagcattacgtttcaaagatacgattcaaaactcgatgtcaagatgagctagggagaccggagacgggcggtatggaagcaggtccacgatcgagatgcccgcacgggagggagggagccggtgccggccaaggaaaccgattgggaagcagccgagaggagagcgagtctcagtcgtcaacccctggtcggctgattcgcttcactcgcatagcatatgatacgcatacgtacgtacgcacgcctgcattcatcatcgatcgagccgaaagtatatgtgtattattactttgttggtccttgtttaattacttaggtcagcctgctggtctcgcgacgactctcgtctatccgaagaacacggtttaattttagagtattgtgcattttaggagaatggtaaatagtaaattcttccgcgtccgtgtctggattttactttacttaggatgcttatacattagttgccccatcgtttagttttcgactcattagttataagcataaatgaaaatttgaaatttaaacttaattttagatttgattttatggctttttttcaccgtagtatattttcagtatttgtttttaaatcgttaaaaacatgtatataaaaaaagtttacctacatataaactattttgtagtcgctagtaagccattttgctagggacgtaagtgggcgatctcacaacccgtacaaaaatatatttgctaatttatttcttatataatagtacatattttttttaaaaaaatacactaaaagtaggataagctggtaaaagaatcttgctttgcatccctacatttctataagcgaaatgatgtggttgtagagttgatttttagactgttttttcctttttcgacagtatatagtttttactttggtgaaaattaaatctttctccctcctgtttaaattgatagatattcgtgatttaattatccatgcctatatatatgtgtgtgtgtgcaaaaaaaaaatattaacgtatgcttctttacacaagtacttcctccattttaaaatatataagatgtatattttattttgttatgacagagcttttaccaacaagtactatgtaagaatatactaatattttgacacaattttttataaaattagagcaattgttgattaaaatcttgtccaatgaaacaatatatgccaaacaggagtatttcagtatcttttcttacctttttccaattgaaatgacctgtttgctgccggcatgcaagcaaaactattcttatatatcttcgcacgtacgaggatattgataccatacatgcaattgtttcttcttcttcatcctagataagatcaactacttattcaacctcatcaagttaattcgttttgtgtcaatttcatcggataaaaccgatcgaggtgactacgctttcttggacaggataacaaatttcttgtacacaggagaataattgatcaacctagtgtcgtctcatgtgtccattctacaatacagtcatacagataagatgaaatccctatatatccttgtgtgtgtgttttttctctgaaagacaacacttgagacctatacatctttctagccttatccatgcatatgtaccaactcgtacgaatatgctaccatgtcagcgtatttggacgttctgatcaatctgctcatccagcaacaagagctagaagaagcagggaaagttcagataaaaggcctagctaccacatgaaagatcagataaagttcagacagtgagacagtgagacagagttagcagtttgcaagggcatcgatgctgatgctcactgaattttcccagctcgtgaggccgtctgcatttgaaattgcattgcattgcatgcctgaattgacttcaaaactaagaacatgttctgttctgcaatctgtactactgtccatgcatggcgacgccatgctctgaatttttcagtacaggatcagacgatcagttgcgctcgcttggtctgtccatcgactggtctagttggtcacacacctttctgccaagcttcttgattctgtggataacagcttgagatcactgcaggtctaggttgctgcctactacactgaagcttcctgtcaagcaatccattcgttggtagtattggacatcttccttctcaagattgtcccaaattgacctcaaggctgaattgttgtgttccaaaaggcagtcttccactatttgcttcaaatcccaagagtagtcaatttcttgtactctgtgattaatttcaaaattttaattactagtaaatatgttatggaatttggttagctccgtaattcgggcgggaaccgtggtaaatataaaaccaagattagtactgtgagacagaatttctactcttctaggctgtcactgagacaggttgtactactgatcacaagaatgttgtccatggtgagcttttgcatgggcaaaagaaaaggagcccaacttgtagtcttgtactttccaggtacagaaaagagcacaacttgtgtccattgatttcaaaaattcaatgaactgagcaatacgattctggaattcagttcggcctgtaattctaaatatgaaatcaagactagtacttacaattacagtcagacagaattttctactctcttcttattctaggctgtcactgaaacaggttgtacatactactaatactactgatcacaagaatgttttgtccatggtgagctttttcatgagcaaaaggaagagagcacaacctgtactttccaggtacagaaaaagttcagtcctatatactcctgcttggatggatggatgagtgagctgtgatcattcagttcagagatcttcaatccttcacacttctgcaacagttttcagacggctctcctccgtccaaatggtccaaattgttgtcaaaagcatcaacacaattccatcctctcctcgctcgatccagctccactcccggaaagaacgacgtcgcagcgtctcttggaaaatgtgtcgcgcgatccgggccccagctgcaagcagcaacgctgcaaatgctaattaacctcgtgagattcttgagctactggggaacgacgacgagcatctgatcagtggtgatgagtaatctaattaattagctcgacaaattccttaagcaaagtctctgattagtcgaagttactaggaaatcaagctcttggagaaaatggcaaagatgcaagtgcgtgtgaactcgtgagctttcttgcatttggaggattttttttttgtgcattccacatgcaggagaaggagatgatgccgttgcaatttgcaaataggaataggagagataggatggaattatttttttggttaagtttcatcaagagagtatcttgtgcaggaggacattgttttcgatggattagtggtaaggttgacggaatcggtacacatgatctgcaaaatctctgacataattccatctctgtaggtgttactgtgttcttcagacatttttcagaggcttgagattgcaactttcatacaaaatatctatgttgcttgcttgctggattgcagaattccattatcgaaaaaaaaatctgcggtttcttgcatgtagcacagcacaagggacgatgaaagtgacaagcatatgccaggggaacattttgcttttcttccatggatggcatttcggccatttttcagggaacattcagagattcaccggcattctcactactttggtaaaatctgtggattggacagtcaaaaaaaaaccatgaacagtgatcaactaagaacatcagatacatagatgctgccactactgagtgctgtactgctgtgagctagctgaagctatggcattttgcagatcaagaatctgagcagtgaaaagcaactgatgattccgagcaattggcggcaaagcgacgatcgatctttcgaaagatcgatcgaaagccaccaggtccaatggattgtcaggcatcattatattggcttgttcttatctatcaaaagtgacaattgccatgaaggaaaaaagagatgagagggaaggctcatttgccgggaggaaggatttgatgcccctacctctaagggaattcctttttctttgggagctcaaggagaaagagaggatgagagttcagagacaagtagttcatgcgatccctgtagtttgccgggaaaatgtgaatcctatgattctagggaggataggtttcaaatgatcttgcttgaacatgtttcttaccatgaaaacgacatggcaagaatttaacatcaactctttatttcaaaactaaaatcatacttgtgttcttgacaccgagtaatattgtcgaaaacaaaaaccaaaggtagtatttttgaaattcagtagcttcaattcgatagttcgattcactggaattcagtagattaattgtgactaaacttcagtaaattcagtagctttgattaattcaacataattgtagtaacaaatggtaaaaatactttccacagatcaaattcaagtaccaggagacatacatatgcctctagcgtcgtctagggtgcttatcatcagacatgagtaacggaatcatgatgttccactagtgaaacttcagtggcatggcataagcataattaaactggcttgagaacagcaaaagatcggccagaaaaacaagaaatgacactttggcttttgcacgtatttacgtacgtacgcacaagattggaccttggaattggccctgattgatggataaggtaagaacagactgcatgtgtccctttttctcaaaaagaaaaaaaaatggtcgataaaaattctgtcttttttaacaaattgtagagtactacttttaaaagagaccactataaaagttgttatgaactaaggcctgtttgtttcaacttaagattattgagccagattattataagctggattataataagtcggcatagaataaattgttagctgtttgtttctctagattattagatgcttgttagctgttagcaacccaataatctaaaaaagcacctttagagtggattactatattatagtaatctggcttacagattataataatctatcacaataagctatctgtttgtttcagcttactcctaataatccagattataataatcctaagctgaaacaaacagggcctaaggtattctttagaatagaggaattttgtgagaatttcccagggaactagagtgattcatgtgaaatttaagtagaattcctgcgttactaaggcatggtttagttcccaaatttttttcccaaaaacatcacatcgaatctttggacacatgtatggagcattaattatagataaaaacaaaaactaattgcacagtttgcatggaaatcgcgagacgaatcttttgagcctaagagcaagtttaatagtatagccaactactcgctccaaatcacctatagtcaacttaatagccaattcatacaatagttacatactacactattaatatctggtcccacctgtcatacacatattgtgtcttggagtccgtgctacagctggctacaaatctgtagcccgctgctcctctctctcctctattatctccttaaaatatgtttatagctagcttatagcctgctattgtacctgctctaattagtccatgaatagccataagtgctacagtagcccacatgtactaatgacggcttaattaggctcaaaatattcgtctagcggtttccaagcaagttatgaaattagttttttttcattcatgtccgaaaaccccttccaacatccggtcaaacatctgatatgatacccaaaacttttcttttcacgaactaagcaagccctaagaggctaagagacctaacaggaagaggtgatggaaccgagctggctgctgacgcctgtgagcaaaatataaattattaattcctccggtcaaaaatatttgttgtttaggacaaatttgattaaagaaattccagcaactaagtttgtgtccgaataaatttacaaaatatgataagtttgtgatattataatggtacacttttcagtgaaatttatgtatatagtttgttttggttttaaacaaagcatttgaaaattattaatggctgaaattttaaaggtttgaccaaatattttcctaaacggtaaacatattttcatcaaatggagtataacagagagatcagcaaaaagaaaaacttatcaggccagaaaaacttgataacaaaagctctcgagttcactaaagaagaaagtggggaattatgacaatcttacaaattactaccattgatatgctccccgagaaccaaaacagcaatgagtaaaaataaatcataaattaattaatcaccggaatttgtagaaagtttttttatttccgaaagcacctgcgctcctgcatttatgtagtggaacagaattggtcggcattctctaaattcgttctgattgatttcttctcctttttgttttcctttttgtgtaaactctgcacaatttgcactttatttatttgggtggaataaattccgaaaactaattttatgttagaaataaatttaccaaatctaataaatttatgatactagccaaatgtttgtgcttttgctatagataaaacaatatattataatacctaaaataaattttaaaataattcctcataaaatatgttatatatcattttggcataggaaatattcacttaatttgattttatatatgtggctatccatctagatttgattgatttttaatactaaaaagctttttaaggtgtaatgtatagaactacaacattcatcgctgttcttctacagcagtatagattataataatacttttggaggcaaatctatgtctatcatttgttttggtttaaattaagcattaaagaaattgttgatggttggaattttaaaaacttgaccttattttatcctaaatggcagatatttttaaatgacgaaggttgtataacagagagattagtgaaaagaaaaacttatcggaccagaaaaaacttgacaaaagctctcaaggtcactaaagaagaaagtgagtaaggatcccatcggatgccctaatcagtcaaagataaagcgaaaattagaacttttaaacttaattttgagactaattttaacatattctcaatgtagtttatttttcaacattaactttcaagtcaccaagaagctatatataaaactttcacctataaatttatttttattttctaataagtcgctttggcttatcagggaatatgagcaaacaatgggacagtaaatatgccaatattcttacatttgttatgctcccccagaaccaaaccagctatgagtaaaagtaaattataaattaattaatcaccggaatttccagggaagatatttttttatttcccaaaacacctgggctcctggatttatatcgtggaacaccttcggtgccctcttttgttttcctttatctgtaaattcctcacaatttgcactttatttactcaggtggaataagccgtgcttctcgtggaaattaatcgcgatcgggttggcatgtataaactgaattttactgagttagacctaacgaagtaaatcactggtatttctaccataagctacatagttaaaaataataataataagctacatgagaatgccagcgcgcgatcgatcaaatctcagaagtaaaataccgccagaagatgcacgaagaaaataaaatttggatcaaattagtaaatacaatgcacgcacctgatccaaaacgcatcttgaacaaaacactaattctaagttcaaacatgacttttactctttttttctacaaacacggtacaagcacaagcatccacgcatatatgcgtgcacactcaccgctatcaatacgcatacgcacactgaacctaataattaactgtaaacataggctgttaaatctagaatttgaacctaatcaataaattcaaccataaaaacctaacaagttaaatatatgctcgttctctaatcataatttctccggagcagggcaaatacaaatataaacatgcacgatcgtatatttatatatcaatactattaccggccaatctggttaactagatgaatactccatcacattgctgcggaaaattaagttgcataatatgtacaaataagatgtaatttgattatcaaaactaaaacaatttgatacaattttgagcctaaaaataattgagattgcatgtttttaagagagaagaaagaagagacaatttgaaccatagatctatcatccaaaggttagaaataattggagtgatgtggcttaataagagaagagagaaataacattaactacacttagtggtgatgaactatataagtatgtatataggataccggttacgtccggtcgatttaaacttctactccctccatcattttaatgtgtgattttgttagttttatatgtaatgttttgttacctgtgttattaaaagtttagtgtaaatataaaaagaatacaagcctaatatttaattaaattgaatggttaaatcaaatgtcatattaaaataaacagcatcctacatttaaaaacaaaggtagtatatatctagccatagtttcaatattccgtcacgtactcgcatgaacctcctcctcttcttcttttctaaagaagacaataagctctagcgttcactgaggaaggatatactcatatacatgtgcataatcgcattctaagaaaaatttatgattttttactgatctcataaccaaataactagcactggtagcacacttagtgtgctataattcacccgggttcaaattctccattctaaattaatattagaacttcattcttaagattttaacccgagtataagtggagggttcactacccctatctatatattggcttgtttgtagtgagagagaactattaggcaggtcagacagtcgcctggactttgcagctaccatcttcactattgacaaatgtcgttacctgtaaaaatcagttgatcaccaaaaaaaaaaaacgctattagtcatatggactcgacggtaatgctagctctgccactgcttgttcccgtcatgcatgctgatataattcaaatcacagttatatatatgatttatttatttatttatatttattttttgcgaacacgctgtttgtttctcctcaaccatacacatgtatttgtgcgaagtgttcacttgttatgacctaagagattaattaaaactgattgtatacatttgtagcactgtcacaacatcaaccagagagtgataattatttcatattttcattcccatccaaaaccacttatattcttcaataaatttacataattaattaagctgcatgcatacactagtattattggctagctagtactaacaattataccagtataattaattaacacacacacctcttaaattaattattcattagtagcttcatccttaagacttagccgaagaacaacaacccaatctctgcatcgatctctctctcgcatcgcatggcggcggcggccggagctcaggccggaggcgggtgcgccgccgccggaggaggagcccgcggcgtgggcggcgccatggcggcgtgctcggcgcagcagttggactggtactggtggaacttggcgatgtagacggccgcctcgaggtccaccgtccgccgcccggcgagcggccactcgccgtcctcgtcgctcggccgcacccgccgctgctgcggcctgtacccgccgccgccgtccagctcggtcgacgacgacctcgacgagcagcaccctcccatttgcaagcagtttatagctactcgatcgagctagctagctagctatagcagtggttggttgggcttagttaatttgcttagctttcgccatgggaggtggtgaatttataggcgccgcgctgatcgaggtgtggaggtgggaagagaggatggtggagaagaagcgcacgcggaatacgcgcgaacgggggggattattcccgcgcaagttgcagctgcgcgcgttagctgctattgcgcggtttcgacggtggggatttgatcacacgtttctcgaccccttcacccttgagattggtgatctgcaggaggttccatgagctaactagctggctacactctccgtcttaaaaaaaataaaaaagtaaatctgaacacgtacttatctaagttcatttagcattttttttttggacggagagagtagttgattactgatcgatctagcataagatcgatgtacatcagcagtttcgatggtgggaattgactgtacgtttctcaatccctttgatagaggatcgatgagctatctagatacgctctctaaaaagaataaactttaacaacaaatgtgaatacgtacttatttaaatttattatcagtttaatttggaacggagtgatgagtagctgattatatactgatcgatagatgtacatgaccacacacaagttgctgcaactttgcagccgttctttatcttgatggacctggatctgcaagagcctgcattattgccatgaaatattgctatagttcacaaggagtatatatgtatgacgtatagattaaatatggatcaatcatcaatggattcttggtctgtaggacctgacaaatgatttggtgattgagcatttggacttgatggattacactataccaccttcatgaaaatgtcagttttggatattttcgactccaacattaaattcaatcatattgaaaatagaaaaaaaaagattggatcactactatgaaattttccccgtgctctctcctccctacccccaagaaaaactccatgggcattccatgaaaggagacaaatgtggagaacgccaggtgaggtccacattgtctgttactagaaacaatttaagtggaccgtctatctaaataggaccatttccataattcactgtgtttaaaatatattatcaaagacagtggagtaagttgtcggggctcttaaggaggtcacttaaaaatagctacatgtattaataattctcacaggcggctatgttaagtggccgcctatgtacacgattgtttgtacagccttttgcttagaaatgaccacaaggcacatctatgaaaatacttttagcctgtctagaaaaatgttcatcttaatagtggatgcatggaggttgtatgtatcgatatatcttgtttttatcgggtttgtaaaatatattataatagaaattaaatgttaaagttgtatcttggagaccatgtcgatatctaaatcaaacgattctcatgggcattggcaaaatagccaacttgatgtaatcgtatgagattaataaaagcttcctttataaaaaaaatggcaaaataccagaaggaggtttattttgtaaagaaaaggataattcctagtaccttccaaagtactgaggtaccataagattaaaattatgctgcttgacagtcgatatattcttaatagccgtaaaatcactcaattagacgctaggacaaaataggccctaataaaaatcattaagctaatataccaaatgtaactacggcggtagacgaagattgcctaccgtacgtagagaataagaaggcacctgtcttgggataaattccaaccgttggattggactgcgaaaagaatggcctagatcttctgctacagtgattatggcctactagtacggaatactgtggctacagactacagttaaatgcatttctttttttaaaaaaatcagcaaacaacatgatgacaaactaactattccctatagaacaaaaaggtgcattctggatagcatttttaggagtcaaattcaggtgagcttctgaattctgttcaaatgaaatttttctgaagttacagtcacagaagaaatttctgaaatgcattgttgcagttacttgtcatcggatcttcaaagtttgcatgctccagtatgatttggaattttggattagtataaatatggtgtttatatttagcgtttcatatagcaagcgttaccaataaaaactgcttccaacttctgattcaaatgtgatttttgttggggagatcagtgaatggtaagttctctctttcgctaatcaagaagagaagttcctgatggaagtcctagaaagcaaattatctggcatgcatgctactactagttaggcataattttacctctaatcaacctcagccaccctctttctttgaccggacaattaggtgtagtaggtactcttttgatcttgggttgcaagaaaaattaatcattttcttagtactagtaatgtgcagctgaatgtgatgctctcacagtacattgtaaaaatcacaactgtcaaaaggatcattcagacttctggaattgttctctgaaaaatctagctgtgcagcaatgctttcctctctgatgctcacagtagattgtaaaattagaattgccaaaaaaaatcaaaataaaaaataactattgccaaaaggacaagttgttctctgaacaaatctagctgtgcagcaatgcaaggatgcattcttccctgatgctgaaagtacactgtacaattacagtttccaaaaaaagtcaaaataaaaaattgccaaaaggatcattcagacttcaggagttgttctctgaacaatctagctgtgcagcaattcactcctctcggattagaaatgacatgaatatttaactgctaatcataggagcaatatcccagttgagcttccacaatccacagcatgcagtgactctttgcatcatccattagggcactgattaaagtaaattcagataagggaagcgagaacaaactgtttagataaggcagtttatgacgataagccagcatcttagggtcactaacatgtttagtcatttcagggccattttaataaccagacatggccaagatttggcctacctctttaccttcagtactaacaagtcagggaccaatacctcctgtttaggagaacaagaggaacaaatcttgattagcatgcaattccgtgatcttacatcctaatcaaaactctaaaaaaaacacttaaaaagaagcattcacattaccccaaattcagtaccatgttcggtgcctaacaagtagacaggcaaaaagttttagagcaaattattcctgctccctttagctatataccgcgtataattctctatactaatctgtaattcagtatagtatagattataccagtttactactgatcagtgatcactgagaaagaccagtcaaaaagggaattctgccatgtaaatgattctaaccacccaaagaagatatcatacagcatattgcagtagaagctttgctgcatacagctccagtcttgcagtctcccaagtaccttctacagataaatttttgcctagttgtatcagaagacaagctgcaaactgcaagatctctttgcttttaggcctttggttcattatttaatttagtcctcgccgtacatgtaatgcgttcttgctgtaatcgcaatgttgggatgatcatgcataacaaattttaggcagaatcctaatgatgagaagaggtccggagttgttaggcgagagctacaaatttagatgtaaagatattagatatgttcatgtcataatctctgttagattaattaatttggattctcaatgcaataatgcagaaccatctccatctgtatgtctttgtgtccagatggcattggaagccgcagctagagatgaatcttggcataggagagtgagttcatggcttccaaagaaagatagcaaccaaagagaacaaagaggggattaatttaagatatttctcacctttaaaactgagaattgttttcatatgacaaagtgtttaccccttttgatcaaactagcaataatttatcgcctcctttccttttgtacgtgccgaacaaatgaagaacaatagaatcttacaaatggtggttactacttacaaaacctagaaagtataaagcaagcatcatcactagagtaacatggagagtatgaaatatctcacttagtttatgaggttccgatatgcaattctgagaagaaaaaaaacaaccggtaagaggttagggtggtttttttattaaaagaactaaagcaatgacctgttttgataaagaaaatattaaccaactgccgaatttagtatattctgatttttttttattaattatgcaacattgcactgttgcccaaacaatattgctacaagagttatttgacaaaattattaacagtgcatctattatgtttctaaatggcagctatattttctagacagacataatagatgttgactggcatcatcgcaaaagcaatataacgagattacaaagaaatcaattttcaaatagatacatcatcaagtggtttaatggatcacctttcctaaagctatcgcgctatcaaacgaactatacgagcgatttgacacaagttgaataaattgcacagtaacattataccttatcaaccattgtctgttgcaagaagattttgcctttatgaatattatgaataaagcacttccagagtccagagaagagagttaggcagtgataccctttttttttatcagccaattaaattcagagtttcacttgtacagtcctaactgccctgtaaaaagcttcttttcttttcattgttatcccctcctgatcatgattcctgataatactgagtttaaacttgaggcagtataggccctatcatattcccctgtgtgtagagttagaacaaatttcagtcttttctcctctgctttttctataaagtgtgtatgaatttattctgctcaagttcagcaagaagcttatatgagccatagatatactagtgccggcaccaagaactctagctggaattttgacttgtcctggcaaaattttctgtgcatccatggccattgaattgcgcggttcgcgagacgtttcaatcgaattttcttcagaattttccactggtgcactgaggtaaaagaaaaaaaaaagaagctggattcatagtgcattatattgcagcagatagggattcatgtgtgctgttcaatctgtcattctgctgtaactagtgaaacgggtggctgttacttgcgttcgcgttgtgccctctgccactgaaattgttccaggtaggtaccttttgctagctgctgttcctctagcttatcgctgattagcgaggtagatgcatggaacatcatcaaggaataaactgttttttgtctttacaatgcaaccaatctagtgctgattgtttttcaataaattggatcattatgtcaaaaaaatgttagcattgcttcaaaactatgtgattgtccatctgaaaacatatttgaaaaccagagcacaacaggaggctgcaactccagtacaaaatttccaaacttttcagcttctaacatatgccattgaggctgtcattgggaatgtcggatgtatgcatcctgggcatgcgcatttacaggataaacagaacgaatgcatgcatgataaacattgagaatctccagcacgggcatattattaacctcccagaactagcagtgtatatctcatatcatacatgcagcatttgagtttgaactaacaaacaatcgactaactttgacaaatcaaataagaatcaacagttacagctcttgtcagaattcatgcttccatgggttgcctaacctggaggcttgaaggtataaaaaaaggcagttaaaacaccgacgacaagtttacactttacagaagcattcccatcttgcagagcattacttctccagactatattcaggaatcacctcatatcagttaaacgacaagatttggtagctgtggaaaggaaactgaactctggtgtacaaagcagcgcattgtctcttttgccaataacaatccatcagtagacaacttttgccgatttatttacgtccatgaggtgcttggtaagcactgccaggattagttgctgcttgcccagctccatactgcggaggctgtgcacctgacccatagggtgacaccccttgcgctggggcaaatggaaatgatgcttgcgctaatccatatgaggatggtagctgtgcgtgtccatatgaaggttgctcctgtgcatgtgcatatgatggtaaagcctgggcagagccaaagttacgtgctgttgttgcactgtaggatgttgattgaacaggaggtccagatgcatgtgactgtggcacttgtgcagatccataagcggatgcagcttgtccccaagcatatgaaggtggtgttgcctgatttgatccatagtaatcagcactactcccatgagcagctgcagctgttgcctgtcctccaagtgcaggtgctttagaaggatcatatccagcacctttcaaagaattgtagcctgcggcaccccttgatgcatcatgtcctccagcttttgaagaactgaagctagcaatacgagaagcgtcatacatattgcctcttgatggatcaaatccagtccgaggagctgtgccagctgggtttccgcttaaagagtctcccagtccagcaggtggtgtccttccctgcaataacatttgaaataccatcgttactaatacataaagattgctccagcaccagttagaaaagcagaagacaaaatatgaaattgtcattgctacaaggaaaaaggtatcgtaattactttatgatcaagggtgcaccgcaagaaaagcatccattaacttcaggacagaaaagaaacgcacaaaggaatcaatgaacaaaagtaaaaaagctagttagtcctgctttcatttacggtattctgtactttcgatgagattgcattggaagcccatgagagcttaggatttgatccaaatccttgattcaatcgtatctttgttatgaactcattctacagtaggtgtaatgatctttgaataaactggtacaatgtattttgtataactcagtgccataacttgaagtcttaaaatttaaaaccaagcaaaagcgcaaaactagctaatggcaaggggtatcccgattgtgcaaataaatcaatttaattacacaagtatagaataagaatttaatatttgggactgaaaataagatggcaattgtataaataaacaaaacaatatccgcaaaagttagcaaaataataattaaaaacttaaaccagtgacattggaactaacagaggccaaatcctcgtgctcttgctatttactggtttattgacctgtgctactgtgcataacttaattcaaggtatatgcataaacatcatagtagaagtgctttcatgatagagactagcccatgaaggtataacaacaaaaaggctcaacttccatgacagataaattctgaaggctatggagaagtgaggtttgcctagtggagttgcaacgacaatgaaatgatatacatagtcatccagatgaaacatgcttcacaaaataataagttccaccgtatgctggttatctatttaggagttataaagatgctcacctgcgcagctccataaccgctatcataagcaatttgtccaacaggaagactaggcgcgccatcatccttttgagcagtattagtattgtatagcatacctacacatagaaaatgtctcatggtgtggtttctatatatgctacccaaaaattgtggtaaaaaaaatggaacaacagataaacggcatgcctcctctgtcaatattagccgtgttcatcagctcagcacgaagcttgtctagctcagcgaccatggtgtcataattcctcttcatcacctgcagcgactcggagtgatccatcctgagtttcctttcgtactcatacgtagccctgagatttcgaccggtgcgcacgcagaaatcgatgtcagtcataaatcaagtaaattcataactaaaaggcacaaacgcggagcatttcatatcgcgcggcacctgaggtgctgatactcctgcctagcggcgtcgcgctcggccacgagcgcggggagctgctgcgcctcgccgaggttcctctgcaggtccttgctcagcttctgcgtgtcggcggccagctgctgcctcgcgacgacgaggccctgcgcctcggcgtgcgcctgctgcagctcggccttgacggggtcgcgggccttgaggtcggcctccatcttggcgaccttgtcgaggatccccctcgcctcctgctcctcggccgccatcgccgcctgcccctgcgcctgcagcctctgcgcctcctgctgcgccgcggcgagctccttccgcagcgagtcgtggctcatcgccagccggtcgttctccaccgccagcttctgcagctccccccgctgcgccatcagcttctgctccaggatctccggcggcggcgccgccgccgccagcatgtcgtacgggaacggccccggcatccccggtgcccccccgtacgggtcccggtgcatcatcttgtgcgccccccggtggtggtaaggcggcggcgccctccccttgctccccatggtgggaaggagagggagggggagatgcgggaggagaggtcgttacctctcgcggtggccggcggcggcggcggcggcggaggaggcggcgggtctagggttggtcgtcgtcgccggcgtggggggaggaggaagacggcttcggatttctcactgaaattttcgtgctatttcagcccacgagcccaggaatggggcgagaaggaccggattgtaaaattccggcccacctgaggaggacaggattgtaatttctgtatttgtgcagggacctattagtattttccctatatttttttttctcctcccccttccttcccttaccctagccggcggcggcggctgcacgagcacgagcacaatccccgcgagctccaaaccctagcctagccgcacgcgcgcgcgcccgccgcgcgccacggtggccggcggcgctccgtccgccggtgctcgcgggctgggaggtgaggccgtgatttggggggtgttcctggcggcggcggcggcggcggcgtgggtggtgagggagcggaggcgcgactactgcatccccgactccggcaactgcagctgtggaagcttcaccgtggccggtaaaaattccgtgcgttcatatgtaaataaatataatggaatatcgaaaatatttgtggaaataattggggggcttcatttcgtgcgttcgtatgtaataaatataatggcttatcgaaagaatttgtggaaatagttggggggtttctttgcttttgatgaatgtttagacattgagctgttcgtgggtagaatttgtggattttgtgagggtttcccgtgatctttctgtcctgggggatggagaggagacgggattagggttggatcactgacgttttgggcgtaggtttgggatctgatgagtaatcatcatctcaccacggtggcgaaaagtgtgtccagaaactaatggatggtcatttctccagtttcaagttttccactttatgtgatatagatagaaccctcagttccatattcttcaatttaagcactgggaccttttgttttgagttatataactaaattaaactgttgggaggataaggggtaagaagaatattttctctaccaataataagctgttgtaagcaatgcagagaaaagtaagggagtgatgggcagattagagtttctgccaaagtccttcaagtcttatctaattgaaattaggtccaaaagttttgaaacctatatgtatggaggggatatgtaatagtaatatggaaattagggtatcctgtgcgttcccagcattccagtaccaaaagtacacttacataaatagtaaattgttgcacgcaaaattaatcatctgactgaacagagagtaatatatattttatggttatctacgattggctgtctaaaactcatttgcctgagtagttaagtggtagcttctttaaaaggattaggataccaggaaactcggtaaaaaaaatgttctgttattattttctgtctgtatctctgttaatatagtggtatagattatagtagtattattctagtgagactagataattcatgtgctggatgctgtttttatgtcctgccccatttgtttaaggatggcctgctgcttgtgtctctcaaaactctttaagtttttcactcggcaatatggtagcctgataatatcttgaacttgatgcactgcctttaactggtaaacaagtatcggctgcacaataagtactttcccatgtagattaacttgctgagcatacatccttaattctgcaaatcattaacactttcattgaacctcttcttaggaaagtgtaagtcatggggagcaaacagatagtagctgttcttcaagtaggtggagaattcaaaactgatgatgatggacagatgtcctattctggtggagaggcgcacgcgatgcatgtgaaaagtgattggacttttaaaacattcaaacatgagatatcttcaacgctcaataacctcaaacttgactcctatgtgttcaagtacttccttccgaggaataacaagactttgatttcaatttccaatgacaaagacctaaaacgcatggttgaattccatgcagagtcagagacaacatatatttatgtcatgaagaaggctgacaacaggtacccttctgactggcataaacatcttcataagtggatatccaaaaatgacatgagacatttttttcagggtaaaaacatctgccgtggtgcctgctgcttctgcagatcatgctgtagcagcaactactccagatggatctaagaggcaaaagatttgtgcaagttgggagaatgcgattactggagctggtcaagtgtttgaaggtccaaaggaattccgtgatgcactacacaagtatgccattgcacataggttccattacagatttgtcaagaatgactcttctcgtgtcactgtggaatgtaccgctgaaggatgtccatggcgtatacatgcatccaagtctcctgcaaagaaggatttcatgattaagaaagtttttggaagtcatacatgtgaatcagagtcagtcaaaagtcatcgtctagcgtctcaaaagtgggtggccagtgttattaaggaaaaattgcgtgatagtccaaactataggccaagagatattgctaatgatcttcagcgggaatatgggctaagcctgaattactcccaagcttggcgaggcaaatcaatagcccagaaagaactatacagttcacatgaagaggcatgcaaccagcttccttggttttgccaaaggattgtcgagacaaaccctggaagtgcggcaacagtagaggccttggaagattcaaaattccgcttctttgttgcatttcatgcctccattcaaggttttgtgcatggctgcagacctctcctctttcttgatgtgatatctgtgaaaccgaacaagcattggaagctgttggctgctacctcagttgatggtgaaggcgatatgttcccagttgcactctctgtagtggacgacgagagtcaagaaaattggcattggtttcttgaacagctaaaagcttcattgcctgtgtctggagaactaacattcatatcaaatggcaaatgtggtctgttggatgaggtctctcttatatttccagatagctatcatggctaccatgtcaactattttattgaagaatttaaggcacaattggatgacagttggagtgaagaactaaaagatacaatggttgagcatgttaagaaagccatgtattcatgcaaagttgatgaattcaaccagtgtattgaactcatcaaagttgaatctgataagcttgctgaatggcttttggagactaaacctgagaagtggtcagatgccttcttcaaggggtcgcgacttggccagtacacctgcaatgttcccgagacaattcttcagtgggtccccagtagatatgagctctcagtagtgcagttggttgatacaatcagatgcaacttgatggagatgatgtatacgcgcagggaatattcgaattcatggacggaaccgctaactccatcaaccaatcagaaaattcaggaagagatgggcaaagctcttacacacagtgttgtttgctcaacaggcaatgacggaaacaataatgtgtttgaggtatgcgatggcgctgtcaatgttgtcaacattgatacatgggactgcacctgcagaaagtggcatgtctctgggatcccatgctcacatgcaattgcggtgtttgagcgcactgatcataacccacttgacttctgtgccaagtatttcacaacagagtgctaccgcttgacctatgccatgtcaatcaatccaatacctgacattgttgtggctgctccatcaactgacccatcacaaggcgaggcattacatcaatcaccgattctaacccggaggcaggttggaagaccaaaggaaaagccagctgatcctcgaatcgcaatcaaaagggcggtgcgctgcagcaggtgtaagggttatgggcacaacaaggcaacctgcaaagtccctatcgcagcataaaacccttgccatatgttctcaagtgtaaattatgttgtgccttttgttgcccttttatgaactcgttctagtggaacctgtgcaatgccatcatgtatcttttatcagataacgtgtgaaacataatcttattcggtggttttagctccaagtatggtttgcctagcactagccggtacttttagattgaactttttgtggtgggcagaatctgggaaaaggattggagttttttgtacgttgttatccagcactcccttcctccatatggttgtaaattttgacatccgaagataagttattttatttctgttgaactgtgcaaatctttggatgagtaataatatctcgatactactcttaaaccgtgacatggatgagtaatagtatctcgatattactcttaattcttaaaccataataccaggttgatgcttgtaacaaatacgtgtttagcatcaatttaaccgttttaggttgtatttaaactcctgaaattttaactatttcttctaaatattatttactatcatatcaaaaatacgcattgttggggcattagaggtcatcagatgccaccaatcaacggcttgccctcgcctgttctgttacatcttcagtttcttgttcattactaatcactgctaataattcatgtcaaatgcatcgagtaatatttggttactgttctttgttttttttgggtgatgaggatagttgacattagaaatgttcattgaaaaaaaaaaacaattataacctctgagaaatacatttgtatagaatcttcatattatattaaactaaatactgcagtgtttcggttttactcatcagttaccactcggatattctgagtaaagaaatgacaattagtactcctttcgatttctaatatttagcatcattaacttatggaccatttgtcatttttttttttttttgcataagtcacgcttaaaatacatttgatgataaaacacatcacaataaataaatgatatttccgtgagttagagttggataccacaatgtaaccatgacgacttagccacacggggagatgatggtggtgtggccatagacttgtagcggctagttgctatgttgattggggagcagcgtccataatcatagtcacaaggatgtaggtttgggtgaacctcgttagcaaatatcatgtgttcctatgtcgtcatatggcatgtcttaggtgatcaatgagaagcgattaggaaggttggtcgtcattccgctatatcgactaaattttataacattatattttagaaccgaaggagtatcactaaataaatgtgggtttattaccttccactaatacaccaaaaatctgaatcatgacaacccatatacagcaaagatcataaatccgtgtaatctgtgaaaatcgcatagcaataaatatatccccattaaacacttgctacaatttcccatggaaaagttaaaacctgcctgaaatatcttctctatgtgtagacaccagccagtacacccagcgaaatacaccaccctagaaacagccgcgcggacggacaccacgtgcaacccgtgcgccgcgctcgtccctctcggtcactgacaagtgggcctcaccgcatcggctgggttccccaaacatggcccacgtcgctggccccactcatcctcatagtatagaatcttcatattatatttaaaacaaatattgtagtctttcagttttacttaccaggggtagagatattttaaccagcgtgccagttctccgggttccctgcttccagtatttgcatcccagtagcattttttttggtttgatgccattaacttatggatcattcatctcatccaatttttttatacatatgaaaaaaatcatccttaaaatatctttgatgataaaacaaatcacaacaaataaatgataattgcatactttttaaataagaaagtggttaaatatatttccaaaagtcaatggcatcaaacattaaaaaccggagagagtaataatatgatagtcaagtggtgaaactttatttaacctgggaaaaacatattacacacttctaaaaatgtttatagcaaataattgcaaaactcaatgaatttcttttttttgtttttattagtaaatactaagatattcacatcaaatcaatcaattctgattcctacaaaccattattctgagaagttaattgaaaacacaatatgaaaatttatactactttaagagaacatagtggtgatggtgattctcccccaagggctaacatccttcccatgaacctccactttatattttgttcattgttagtcactgctaacattttcacaccaaaaaccatagtatttgatcataatgaaatcattctctatgtatttttgtagtattataatggtacgtataatagatattttcaattttgagttaccacttaacactaaacttaacactaagatattactctattttcccccaaaatataaggtgttcatattacttttagctgatacttaaattacaggacaagcttagcataatgtatgtgatgtcgttagatttgtattaaaaaaactttttcataatgttagtttcgtagttgttgattgtatactataagtaaactaatgatcaacgtataatatgtcggaaagatgggcttagacagacgtgggaaaccacatgtctgtgattgactagaggctctaggtgaacttgatctgctcaagagtgcttgggagcaagaaatgcaaagcaagtgtttgggtttccccaaggataacaactatacatataaactagagtagggttattactcatcccgagggtctgaactagtatacaaatccctgtctcccgtctaccttatcgcaaactcacgtataccttagcactagtgttccccatactatactaataccgttgtcggtatagctcatcgatagatacacatcaacccgttttacttaccatgagaacacatataccccttcccggggtgctaatgggttctcgcggtaagacaactggagtgcggaaaccatccccttcccagaggctaccatgtggtggcccctaggagaggatgacccacctactcaccttgacttattttggtcaagccatgcctagcattcccctaccagtccttagtcatgacctctatcttaatacaatgccacaacctagttggccccatgtaacaactcatgggacaagcggctgcctctgagcagctttgcagacacgacttcgacccgagccaattgaccatagtagagtctcataagttcaatctttcttaagactttgatacctagacaggtgatgggcatatagacctccccaccagggttcgtatttggcctaggccggagaaacactcacccaccacccacacagttttgatgacttgcattccatgttaagcaaaccggtgaagtgagggactccttagccacgatgctaatcacgtaaaatgctaatatgtcttacttcctccgtttcatattataagactttctagcattacccacatacatatatatatatatatatatatattaatgaatctagacatatatgtgtgcctagatttattaacatctatatgaatgtgggcaatgctagaaagttttataacctgaaacggagctagtatatctttagaatggagggagtgtcattaaaagaaaatctgaatttaatactttccactaatacaccaaaaatctgaattatgactaaccatgtaaagaaaacaccattactccacataatcttgcaaaatcatattcacactaatacccacctgtattacaccagttattcacagcaagcatgcattaattgtttccatatctgagttcatactgatatctactccattaataacccccattaaagccattaataacccagcaaaatattttccaaaattacctctttgaaaaaaagttcatggagttttgcacaggaaaattactgctgctctgtgtacaccagccggagtacacccagccaaaaaacaccagcgcatcaccataatgtgttcatattacttttagctgatacttaaattacagtacatgctcaacatgatgtgtgtgatgtcgttagatttgtgttcaaaaagtactttttcataatgttagttttgtagctgttgattgtatactataaataaactaatgatcaacgtataatatgtcggagagatgggcttcaatagacgtgggaaaccacaagtctctgattgactagaggttctgggtgaacttgatgtgctcaagagtgcttgggagcaagaaatacaaagcaagtgtctgggtttctcgaaggataacaactatacatataaagtggagaaactggagtagggttattattcatcccgagggcctgaaccagtatgcaaatccttgtctcctgtctactttatcgcaaactcgcgtatactttagcaccagcgttccctatactatacaaataccgttgtcgggtataggccattgatagatacacatcaacccgttttgcttaccatgagaacacatgtactccttcccgggatgctaatgggttatcgcagtaagacagctagagtgcgaaaaccatctccttcctagaggctaccatgtggtggccccctaggagaggatgacccaccctactcaccttgactcattttcggtcaagccatgcatagcattcccctaccagtatttagtcacgacctctatcttaagacattgccacaacctagttcctaggtggctagctagttggccccatgtaacaactcgtgggacaagcggctgcctccgagcagctttgcagacacgacttcgacccgagccaattgaccctagtagagtctcataagttcaatatttcttatggctttgatacatagacaggcgatggacatatagacctccccgaaagggttcatttttggcctaggccggagaaatgctcgcccatcacccacacagttttgatggcttgcattctatgttaagcaaaccggtgaattgagggatcccttagccacaatgctaaccacgtaaaatgctaatatgtcttatatctttagaacggagggagtgtcactaaaagaaaatctgaatttaatactttccactaatacaccaaaaatctgaattatgacaaaccatataaagaaaacacaattactccagataatcttgcaaaatcatattcacactaatagccacctgtattacaccagttattcacagcaagcatgcattaattgcttccatatctggggttcaaactgatatctgctccattaataacccccattaaagccactaaaaacccagcaaaatactttccacaattacctctatgaaaaaagttcatgtagttttgcacaggaaaattactgctgctctgtgtacaccagccgggtacaccagccaaaacacaccagcgcatcaccaccagaaacagccgcgcggacggacacagccaccaccaccggggcacgcgcaacccgtgcgtccacgctcccccaccccaccccccgcgcagtcatcgacaggtgggccccaccgcatcggctgcgttccccacgtcgcctggccccactcaccccccgccacgtgtcccgtcgcgtgactcgcgtcacgtccccttcccccccttccgttcccccggggaagcgagacctctgacttttttgcggcccccatccgactccctgacacgtgggtcccacacctaccgcagcccacacgtcagcggcacaaccgcaaaggaggaaggcctcatcagcgagaaacctctgaccttttgcggcccgcatctgagtcaccgacatctgggtcccactccaccacggcctcatcatccgccccacacctggccccccgactcgactctccgcgaattcccctctcctcgcttaaccctctcctcgctttgctcgtgctttgctttgcttgttgctctcctcgcgtgagctctctcctcctcttctcccccacccgcctcctcctcctcctcctgctgctgctggggcgaggcgatgccctagatcgtagccctagaacgagcttgcgcggcgaagccccgatcccccacaccattcccggaaatggatcgcccgccgcatctcgtcatcgacctcaacgaggagcccgagccggcgccgtgcgagacgccccctcccgcccccgcccccgccccagcgcccgcgccgccgcccgttccagcggcggcggtggcggctcctcttcctcttttcccggcgcagccgacggccccggccgccgtgggcggcgccgtggtgagccaggtggggatgcttccttacgaggcgcgtgaggtggcgatggggatccatcgggacgcggtggcgcaggcgcaggcgctgagggtggcggcggcgagcgcgatcgagtcggtgacggcgagggcgccgccgttcgggccgccggcggcgcggcacccgggggaggcagggcgtgggaacccgccgcccccgtgcgcggcgtgcggcctccccgagaaccccggggggaccatcgtctgcgactcctgcgagcgcgggttccacctcgcctgcgtccgcgtctggccgccgctcatgccgccgccgccgccgccgccggccccccccggcgcgcgtcggccccgcgccaccgccaacgaggactggatatgccccgagtgcgagatgcgtggcgcccgcaccaacaggtggaagctcggccccgtgccgctcgacatcaacgtgcccccgccgagcaccccggacgcggaggaccccgtcgccgtcgccaccagagacgtcaccaggcagttatctcagctctcatttcctcaactccttttgcttacggctgacttgatccgttggtctaaaaagtgctgaaaattcatgccgccttgcgatgaaatgctggtgctctgcagatggtattcttggtgggactaagccacacccgttagcgtgggatgacgctatgaacccttttttgttatggttgatgttttaattcattgtttgccatggttacagacttaatatgtgtgttacgtttatctgctctgtttgactgttgatgcatttggatcttagtcctgttgcatgattgatgccgaaatgactgggtttcaattctatagttagcactatgtggcagtggccttagtctttttatagcttcttgttatagtgattactaaatttaggtgccacactgttgcttgtctcttttcttcccaatacgctacgaaccagatatattgcactgtgcagatgatttgatgcttttaccctttgcttggtatggtcaatggtattatattctgttgaagtcttaggatcttgcctatgtcatttgtaatttgcattctcagttgattcaagtaggaacctacatgttctcttcatggcagattggcaggtccatgtagtcaatttgtagtttacttatagtccatattgattttctgttgtagtcttaggatctttcctatgtcatttgtaatttgcattctcagttgattcatgtaggaacctacatgttctcttcatggcatattggcaggtccatgtattatagtcaatttgtagtttacttatagtccatattggttttggtctagactatgggtcctcgtgtgttttgtgtacttggcttctggtctatccatgaatgcattagcttgactacatatgctccctactaacatggtaacacagcatagttctgaaaacctctagttggcttcaccaatttgctcttgccagttgccacaaacaaataaggcatgggaagagaactagagcactagtttgtattagttcccttctgttaccatattgcttttggtctagactgagtcctcatgaatccctattttcctagcatgttacaagagatggacggcatcaaagaaactctgtacttctccaccaatccgtagttggcatggaatgaatcaatgcttttgtttttttgggggttgctgctatcagaatgaatcagtgctttggtttttcaggggagagcccatgtaattgacacacttacacctagtaagctccctgtggtgtttgaattgcaatgccacttttggctaccttttcatcctccattttggatctaaagcgtgcaccatcttgtcgctgttgtgcattgatgacctctatcgcaccatttggacctacatggaaagcgataccagttgcgttgcattatcttgtgttggtgtttctagcctcattgcaatgaccattcaggtttccttgctgcatcttgtgctgtcgagttactgtttcatgggcagacttgtatcacttgctttccctcatgatatcacattctcagcttttctccattgaccttattctacatcctttggatttttatgtttaaaggatttttttagtttaatcaaagttacatggccttctatttttttttgaagccattccaaatttagaacatttggtgattatttccttggtttggcacttgccattcttatctgatctaatgatgtgtaccatgctcgttcttcttttaggttgatcacagtccatcttggaccgagttcaatctccactcttctgccgcatttatcatggcctgttatcatcgattcagtttttcacttgagtcctctttttttagccttcttctgatttgttgcctttgttgtgacttgactatcttagtcttcttttcatcaccatcttgctaattgttgccaccattgctgcttacaatcatcaccaccttttttttttttgcaattgttcggtgaatccttttatgcctatactagccagtgtgattgtctttgtctctatgctattggttttatataatagatttatgcatctttttttctacatttccaccaactttttagatagtatgatgtgaaagtgactgtcctttgtttgcgtacgaagacttccgttttggaaggctaacatcatgtagagaggatgttgtttgctcttccaacatgtgcatttgatcaaatagcagcatagtatggcttgctgcataattttgtagcttataggttttatgtaagagtacataccatttaattttaacttttaaggctacttggacatgggcaccttcgttagaaatcaacacttggatttaggtgttcgatttggcaattaaacatgcatattactaattagaaatggacatgattcaatttggattcaggtgtttaatttggtaattttttttttgacatgggtgtttgagtggaatagcacttcatatttttttataatttactaagggaggccatctttggtcctattattgtagtctaatgatctcatgatagtgatttgacgataaaatgttactgttgttgggctcgtaggcatatgggcctattagaaccaatcataattggcatatttgtcttgaatgaatgccaacagatacatgtcttctgtttatgtataggagatgttgggaaaatgtttgataagaacatggaataggagatgttggggaaatgtttataagaacatggaaaccattaaggaattggaagacataggttatcgtggcagccgaggtggtcaatcccaaagattaaaagttgcttttttagatgtctaatttcctttttccatgttatgtacttatgtagactgatatcttttgtagttatttctgcctcttataagctcttggtaggaggtattttctatcagggccccatgtttgagatagaacaatcaacaaagtagtactcccgcaaagtctatagtttctctccccatgtgcttctctccttcaagccaatattgtatgatctccacctagtacttaccatgttatgagccaaggctcaagtcagattaccgagtatccatattagaggagagtgtagattgtatacccattttctgtttctatctcattttgatgatctcttgtaccggtatattggctagggtcctagttggctatatatatcacaactgcccccctccccaaccctgcaacaggtgtgagccgttttccctaattctatctttctacatggtattagattcagagttcttaccttttccggtgccctagcgctgctgcgtcctcttggccatgcgatctcgcacaccttctgtacgttgacgacatgtctgcactccgagttcgccatgacagaccttggcgacctccatcacttcttcctctgcatctccgtcaagtgctcctccgacggcctattcctgtctcaatgacaatgcaccgtggatctacttcaacgagcaggcatggtcgagttctactctactgcgacaccaacggatgcacatgctaagctgtatgtcagagacagtccacctcttgataacccagtggagtatataggagtctcgccgatgctttgcactacctcaagtcgactcaaccggatctggtgtatgtcgttcaacaggtgagcctcttcatgcatgatccttgacaagcggattctccgctacgtgaagggcactctctccatcggccttcacattggcaccgacaaagtccaggcttacaccgacgtggactgggctagttgtcctaactcatgccgctccacatcaagctactacatcttccttggagataatctagttgcttggtcttcgaagcaccagaccactgtctccctttctagtgctgaggcaaatatcatgctgcaacccacgtcgccgtcgagtgttgttggttgtggcaattacttaagaaacttcatattcggccatcattgtctactacgataacgttagtgctgtctatatgacaaccaatccggttcatcgtcgcgcgaagcatatcgagattgacattcactttgtttctgagaaggttgctttggggcaggttcatgtgctacatgtcctgtcttctcaccagtttgcgtacatcatgaccaaaagcctacctatttagttatttactgattttaggtcgagtctttgcgtttgtgatcctcccgttgcaaatgcgggcgggtattggaggaaagtgtatattgtataactttttttttgtttctatctcctcttttcgaggatctcttgtaactaccggtatattggctatatatataacaaccgcccccactgttgggggaatggctccggatgacggagccggcctccgtcagtagggaaactctgcccggagccatccaccaagggagaatgaccgaaggcaacagctaccccgatgatcgagtccgactaaaggcttcagagccgaccaagggctccgaagcacatcaccaactccgaagctgaccaaccgccccagtgcctaccataggcttcggagcagaccaacggctccggagcagaccaacaactctggagcagatcaatgactccagagcgaatcaatgactctagagccaatcactggcttcggagctaaccaatggctccgaagcagatcgaaggcccgaagtgtccggggagctaaaatactcgagcgtggagaaatggttcacgagcgtagtggggcaccattaatacgcactacgcatccgccaaccacctctgacatcctaacaagggcaagatggcatccgctattatccgggggcatgcctttacctggataatagccatcaccctcgggaagcgtcatcgcttccttaatgggcgcagccctccctgtctctaggggttttaccgactgccctagggctggcccaccggccagccgctctacatcttatctagctagggtaaagatgtaacttcctcttgtaccccatgtataaatatgtaagcattgtccacagttagggacagattgagtacaaaatacacattgaatacactgtttggactttgttccaacacccaccatatatgtgaagagttttccctaattctatctttctacaatccacacttttaacgtcacaacaaccattgacaacatgaacaaccaccttcaataacattgcgtctatggtagatgatattatatcatcattggtcaagtgggttatgttgttttctgtggcattttaatagttgtgctgacacccatgccaactccatctcaaacgatcgtcttcggctccatcactggccttgtcaaagaaaaagaagactcttatcttgagttctcttggtgttgacattggcagtggccaatgggacatgccttatgtcatgttgagcgcaacatattgccaattgttaccaagtcccgcgattagtcgtaaagttggtcaagccacacgactagagtgccacgacttgactgaatagcaagccacacgattaatcgtggttagttgtaaatttagtaagagatgatcgtgcatatctctacttgtaaatgatggtaagacgaccatatatagaattaatcaataacataccacaaacacaaaacgtttctcacatcactgaagaacgtatagatttagacatattgaaatagctaatctttatttccttgatggacaaacaatgtcgaaccatattttagatagctacaataacataaaatcaggaagtaaaacacatacggatgaatgattggaatgtaaagcaaagtttccactacttgattggagtaaaaaatcggattggacagattgaagaaagtattttcttacttgttttgcgtatggagtttggcacgtgagaattgtagctctccgcacaacggcttttttagaattgttcaactagatccctgcaatttatttttttagaattgttcaattggcaagtgagatgttttgtcagattatatgtgctggaattatgacatcaaatttattagtatatatatatatatatatatttattttaatgatgtcacaattttcgcgtgccttttcatggagttggtagacttagtctatactccctagaccttaccctttatatatggcctatcatcctagactccttgcaatccatctcctcaattgaagtattgaaaaaataggtggaaaagaggaagggttaggaagagatcatctaagagagggaagggggaagggtgagggagagatcatctctaacttgcttcttcagcgctcttttgcaatcaatgctgaatctctcttgaactgataggacagcgagcgattcgcaaatctgtccatctggaggtatagatctaggcctgagtctaatttttttcgttttctgttggtggtacaggtggttccgtgaggattttggaggggttaatggtttgttgctctgttcatctggtgctttgcatctagggtatcaacaattatagatctgcaattctttgaggcgtttaaggccttctttggaacataggaattttggaggacttttgtgggtgttgaattagtttggtgaaaatcgtgtaaaatccttgtgatccataggagccctaaaccttcagcacatcgtgcctactggttttgacataacatcggaatttgtgtcttgctatgttgatccttctctggaactgttctgttcatggccttaaccatctgctttaatatgcttgttttaggttttttttttcatgtagtgctgtttggtatcagtggagaaaagtagggggagaataatatcagatgattgaaatctaggaatttgagttttgggaagatgattcaaatctatgttgattgcatagctacaataaaatgatttacctgatccatgtgttccaaccatggtcttattgtttgaatcttgtttatgtgctatactgaaagcgtgctgtattctctatagttcattgtgctgcaatccttccatagttacacatgaataatgatatttgtgttttttttgtcaagtggacctgttttgatcactattcacttgaaaaatctgtacaaaggaaaacacctctgatctcttgaaattctggtttgttgcaaagcaaaatgaaactgcaagtaacccagagtgtttttggctgctctgactaacattatctgaagtttttggaagttttctaatgatgtttgtcatacgaacactattatcactaattaatatatccttttgatctgcagaacaaatgctgcagatggagcgcatttgactgagtttgctgtgcagctgccacattttgaggggcttcacttaaagaacactgctctttatggtaaggattagagaacaatcatatctaggcaagagagatgtgtagaagcttttggctggaaatttactatgccttcaaagccctgtaacttttttaagaacatttttttgtgttaagtgataaccatcaacatcaaatcctgctagctgctatactcagtgcatagttgctcaagaaattcatcgtatgttgttttgctcagttaggcataacacgtgcttgtctgtaaacttcaacttcatgataattcccagaaatttgtgagccttaccaatatttgaattctcctgcatggtgttttatgctgtgtatcttatacctgtgtggcttcaaaggtgactattattggtgcagcttatgacaactccactactttcttgttgcagatgggaatcagtttatgccagcatttggtcttgctcattgtctgagcatgagacaacaatttacttccatggaccgtgatatcatggctgatggaaacatagtgcaaaggtcaattcatttgcgcagaaagagaagggatcttccacagacatcatcattacccaagtttgctgagaaccacgagcttggaagtgccaatatctttatggatccatctttttacacaaaagcaacagagtctagttctacagaaaacaaaagttcatcaaagcctccaaaatttcttggggaaaatagtagccgtcgaccacatcatcgtactgtgagtatcttattgtccattttatatagttctctatccactgtccactttagaaattgcagaaccacatgtacatgtaccatactaccatcctaaatatttactccctcagtcccctaatataagggattttgacattttacttgcattgtttgatcactcgtcttattcaaaaaatttgtgcaaatataaataatgaaaagttgtgcttaaagtactttggataataaagtaagtaaaaaaaataataattccaaaattttttgaataagacgaatggtcaaacagtataagcaaaatgtcaaaatcccttatattaggggacggagggagtatatgacaaatgtatagaagacatgatggctggtttaaattctgaaaggtttgatcaattttgacttttcgaggattaattgatggcaggctgtgttcgcctcccgcacacgcaaaacggagtgactcattttcttataaataattaagtactccctccatttacttttgatagtcatatttccaaatctgaaaaatttatttttgataggcatatttcaatccaacaacctattctcttaatgactttctcggatttaatgcgtgactctctattcttccacacaagattagctacatgggcatcgagaaatgtaaatattaacgaatcgcttgtttgcgaggaataactagtagcatgtttaaatggatgataagtagaattacttatccttggtctatgtgtcaagatgaaatatgactatcaaaagtagatggagggagcatttattattattattattttaaaaatggattaatatggttttttaaaagcaactttcgtatatattttttttgcaaaaaaacgcaccgtttagcagtttgaaaagcgtgtgcgcggaaaacgagggaggtgagttgggaaagttggggaaagaactcagcctaaatggatctacatgtacatgtgggaaatctattctcatatgttattttccaaaggcacagacttgtagtttctggaattgcatatttatatgttgactcctatactgaatttgacaatattgctttgttgtgtatctctaggttggcctacctgttcaatatagtgatttctttatcaccagtttgggagaaatcgataaaaggccaagctaccataattcctaccagatatggccagttggttttacgtcttactggcatgacagaattactggttcactgttcgagtgtgaggtgtgtgacggagggaattttgggcctttgtttaaggtgagaaggatatcatgttcagtgttccctcttccagatgcatcaacaattctctctcaaaatagtacaagaaaggctgagacaatagaaacaaatgaaaacaacactttgcttgaagatactgctaatgatacagatgataatatcttaatgctcctatcagactcttctgagaccaatcaagatttgttatcatgttttagcaatgatatggagagcaaaatgacttctttaggttgcaatgatttgcatagttcaaataggtcggtaccaacagtaccgtcacactctgggactgacaaaattggcgagtttacgtttgagggaacatctccttcctcagtatggaggatgatttcttgtgctatgatggaagcttgtgaaaaaatgtacaaggaacatggccatttggtgttcttctgcacacatggtactgaaaagcattcatttgacagtgggagtggatttcaggactttaatggtccttacactccattaactagattttgctcatcttatgggcccagtataccgagaattgtagaaaaggagaatgatgtggagcctacttattcactactcaaagaatggctataccaagatagaattgggtttgacttggaattcgttcaagaaattgtagaatctcttcctagatctagggcttgttcaaattaccagttcttgtgcaacagggctgaattcgtctcttctttgacagttgcaagtggttcacttagagttgtacataaaaatggtcagagtaatggagacgtcatgtcatatggcagacatgggtctgtggtgactgggctacaggatcatacccagcctagtggttttagaatccgtgaacttcctctgggacgtcctattagcaataagcttccgccagagttggcaggagaggttctccaggtataactctatgcatatgttttccatttctcttctatttgatcgaatgtacctgtacacacttgtccaaatctactaattattgcatctgattccttgcaatcttcttgtagatatgggaattcctgggacgtttctctgaaataattggcctgaaagaaattccttcatatgagcagctagaagatgaacttattgacccatggccaatttgtgcagatcagaaagagaagttatcaaatgacattcacagggatcacacttcgccgattaattcccctgcaaatgtttctacatcatattcaaatggtgaatcgggtctaaccagtaatgaagagattgtatctttgttcatccctgttgaaacttcttctatgaagaaagctgctcaagataaatcggcagctcagacgcttggaagatgcagtggcgtagtgttgcctggggttcaccttacactctttagggttctttttggtgagctattatctaaggttgcaatttttgtagatccaaacattgatcctaaagaatcaaaaactaggcgtggaagaaagaaagacactgagaatctcatttcagcaaaagaatttaaatttgacatgctaacagctaacaagttgacttggccggaattggcaagaaggtatattttagccatttcgtccataagtgggtgcatggatttatctgatatttcaagtcgagaaggagtgaaattattccgctgtctacaaggtgatggtggtattctgtgtggtgcactacctggggttgctggcatggaaaaggatgcgttggtaaggaatcgcttcttggtttagctgaacttctgtttatgatgaatatatctagttttttatgtatcatatatggaatgttggctttttttagtagcgccgatgtaacttttagcttgcttcggtcatataagatggtatttgctatcttctcttcgtgtttttcttcaattttttattttccactcattcatttaaacattatcaagttttttacttatatttctacccttatacgattttgtcttcttttaagttgtgaggaaaagatatatgctagcaaaactagctagctggacaaaaaattttgatatctcataatatgctgtgaactttctgcactgtttatcattattataattctatagaacattctctgttaccaaccatatcaacacttttaccttatcttgagggagaacagtagaaccccttattctgcttgtataattctttatgtttgttgttctatgaataatagatgaaaggatgttgcctatcagtgcaggataatcagttaaccaaatctaggaagatatttcctatggttctatagggagcccctttacctgtttttagagatttttgctgttaaatgatgcctatggcgacaaaattcttatttttctcttatgttactagagaattttttttcatgttccgaataacaaagctgaaattgagatttcctagctacagcaattacatgtccagctacatcattctgaatataaatctgacctggaaggatgcgttaatgtgttactgtctgtcatataacttatctgtaactttttctacttcatttccatctgcagttgtgtaaagaaaactacaaatacaatctccatgttaagtagccttgtgttctctaaggagaaaatataatttttcttatgctgtactttatacactaatcttcttgtattttcagctgcttgtggaggctgaaaatttgatatgcaaatcttcggtgaatgaagaaagtaaggtttttatgatggatcaaaaggatactgacatggtagattctcctgaggtgtctgctactgataataaaacattgcctgactgggcaaaatcactggagcctgtgagaaaattaccaacaaatgtggggacacgaattagaaaatgcgtttatgaatctttggagagaaaacctccggaatgggcaaggaaaattttggagcattcaatcagtaaagaggtctacaagggtaatgcatctggaccaactaaggttagtgtgctccctgcaactatggctcaatcttctgcaaaataatgattttcacatactgctttatgttaagagtatttaaagcatggtctcatattagtttaggtttattaccatgtgtttttctgcttatattaggacttgggagtcctcatgtaccctatatgtttggctcttgccaagttggcatacaacattaattcatctgttgagttcctgtcatacatcatgtaatacatattgcatgatagttccgtatctccccaatagtttgtgcttttactatgtctattgtattccctaaaaaagatgtgatgaaaaaagggagccccatgagaacaatcactgtgacctttgattttgatgagaggctttggtggtccaatgagttttttatgtttatctagttggttagtcaaggtttaatagctcttgtagctgtaggtcatacgttttaactttcttaatttcagctcacatgccttccctcatgactgtgtcggattttctgctgatgtgatgatgcttgatgcttccatggcttagtttagctggaaaaatgttgacattagctctgtgttgaaattgcatttctactaatatgctccctccgtctcacaatattgctacttctccgcctacctctcaaccaatcacaaccttttcccattaattttttacctactttctcatctcaacttatcacaaccattcctcacccctaccttaatctcataaaaaaaaagggcataagtagttgtattttgagatggagggagtagtgtatatgccaaaaagtgatctaatggcaaggccatgcttaaacatcattcaaaagaaatggatctggcattagattaaatttgatgtccatgctgatattttgtgtttcttttgttcttaagaagttcctatccctatgcctaaaatattgtttggttgcataccttttttttttgttacagaaagcagttctatctgtgttgacagaagcatgtcgtgtaaaagtaccacataatccagaaaagccaagaaaagagagaaatgctatttccatctcagaggctatcttgaagaagtgccgtattgccctgcgctctgctatttcctcagatgaatccaaactttttgggaatttgctcggaactactctagtgaattccaatgaaaatgaggatgaaggcatactaggattccctggtatggtgtcccgccctttggacttccgcacaattgatataaggttggctatgggagcttactatggatcatgggaggcttttcttgaggatgtccaggaagtatgttttactttaacatttataatattattcaattatgatgcacatgatatattttgcaagatttttcatgtatgttttgctaatgtggatccaatgaattctgtttgcactgttgtaacaacttggaacagcagttagtttattttgtgaattttttatggtgatattttgtgaacctactatagtaattcttgctcatttacatgtaaaattgagctgttcatttgcataactaattgagcagtgcaaaaatactgaaacatattctaattaatattctgtcttcgactgcaagaagttccctggtcaaattatgctgccattatgctttcctgtaggtaatacgcaacctgcacactgcatttggtgatcgccctgatgtgcttgaaatggttgttgcattgtctcagagttttgagtcattgtacaagacagaggttggttaatcctatttttctgttgcatctttgcttttctgttcagctttattgttcctccaaatgccatcacaataactagatattgtacaaaataccaatagccattacattttccattcatgggttttgtcaccattcattgcacccttgagctacattggtcagaccattgttgtaaacgattatcagtttagtttacctatccaatttagtttcataatctaatgatggaaacaatgttattgttacttgaaaaaaaaaaccacctctttgtgtgttatctcatgtgattgctaatgctgattcgaatatatagatcctttttatagtttcatattttaaaacattatagtcagggttatgtagaagtcttttatcttctcatttcccttctacttggctggtgcaggtgcttgaccttgttgagaaatttgacaaatacctctcggacaagaatgctggttcagaaatgcacgaggagctacatgatattctaactgcagcgaacagcttacctaaagctccatgggaagatggcgtttgcaaagtatgtggtattgatagggacgatgatagtgttctgctatgtgacaaatgtgactcagaataccacacttactgcttgaatcccccactagcccgtataccagaagggaactggtactgtccatcatgtatgttaggtcaaacgaaagcacatcatgatcagggtgttcaagatgtgaaacggcagcaaaagaaatttgttggggaggaagcccatgcctttcaagaggaacttaataaattagctacagcaatggaagagaaggaatattgggaccttaacatgcaagaggtttgtttttcttttttcctttgtatttgaagtaagcttctctgttgttaatgtgtggtataaaccaagaggctcctcaatcccaaaataatgactcaaaataagcttcttagagttttgagtgatacaagacaaagttggacctgctataggcccctaaacctataaggacttaaggtcaggtcaataatttggagcttgaagttaattttgtcatccatggaatagtatagtagctacaatgttttgttgctttggacatccaagttaagcaacacgtaaggaattgatgtgtttttcttatttctcagtggtaaatatatactgctggatacagttcttgttaccatttcaaatataccttgttataagtatgtctatttcatggacattgcatacaattttagtctggtttgattttttacttaagagtcctgccctctattattgtactgtacaatactatgattgcctaagcatttgctggtatgctgatttccatagttgacaaagtgacctacatatttgttttaatattttattgtgatctttgaaatgcagaggatatatttactgaaatttctatgcgacgaaatgctcaacactgctctaattagagaacatctagatcaatgttcagataagttaggcgatcttcagcagaagttccgtgcttcaaattttgaattgaaagatttgaaatataaggaggagatgaggacttcatatgctagacaaagtagatctagtaaaactgaacagcattttaacaacagttctggacccgtggaaaatcaacagcagtgcacgcccacagcattggaccatctggaagaggctgaacagggtaatgttggagttaacctaaacaacccagctgatggggttcctgatgggcaattgaatgtaggcaagccttacaaaagtgacaaagacatatccagtgcatctatggttgaagaacgcaaatcttcaggactttctgaacaaccatcaggaatggctattgaccagattgatggggatgctattgatgaagggtcccagagttgtgagaagaggtcattaggtgccaagagcagtacatgtgataacttgaacttgaaagacactgaatttagcacacctggaagagagttgcctgatgaaagagccagcacatcattccaagataatcttgaagcatcatcaactaaatcaattgagcttgatgctgataataatgaaatggatactttatcggatgacatttcaaaattgcaggattcaattagcttactagagtcacagattaatatggcatcatcgagaagagagtgtctgggtaaggattccattggtcgattatactgggttataggaagaccgggtaaacgtccttggttggtggctgatggaagcatgctgaaacccaaggagagagatatcagtatggttaacagttatcccccatctgcttttgattgcaaaggttggaattcagcatctattttcatttatgaatctgatgaggaaatccagtgccttcttgactggttaagagactatgacccaagggagaaggaactgaaagactctatcttgcagtggcaaagacatttctgtcatcaaagcagttctcctctcgttgatcctccaatttctggtccaaagggtgaacagcttatggagcttccaaataccaaggctgcagtaattttggaacaaaagtatggtctgcaattggaccaggacacaagtgatctaccgaaaaagcgaggaaagaagataaagttaagttctgaagatagaacatatcgctgcgactgtttggaacctgtatggccttctcgataccattgtttaacatgtcatgagacttatctcatatctacagagtttgaggggcataatgatggaaaatgcagtaaaatccaccagtctcctgatgaaagcagagaaaatgatgagccaaaagtgaaggttaccaaatctgatacgaaggaaaaagattcccttgaatgtagctctgtcattgaaccgtccagtgacagaaaattgatgcaatgcccatatgactttgaagaaatttgcagaaagttcgtcacaaatgattcgaacaaggagacagtaaagcagattggacttaatgggtccaatggagttccatcatttgtgccttcacctgcattttttcttgaacctgcaattgtacaaagtcaaaacagaaaagatgatgaactcaaggattggacctcctctttagaggaatgcaatgcaatgtctgctcaaaagctagttcaagaggtttccaaatctggtcaaagttgtcctggcaatgtgggtgatgagaaggtgcaaaaatctaaaaagcccacccctgataatacttctggtgaggaagcacattctacaacaggcaagccaacacgattgctagctgttaatggggggttggttccagagtcatccttgaggcctcttataggacgaaactctcacatacttaagcagcaaaagataaacttgcttgacatcgaagcagccttgcctgaggaggcactgagagcctcaaagtgtcagcaaataagaaggcgttcatggcgtgcatttgtcaaagatgcagaatcaatatcccaggtaccttaatctatctattcactgtttgttacagaaatatatctatgtagcttaatgtgtaatcttggcatactgcatttggcttacgttcatcaaattgatagtgttccgaaattctaagatatactctcaagcatgcagcgttaatttaccatgtctttgtttgtgtctgcaacagttcaatttaactgtaaaattacttatacaggatccatttatttaaaatttttagcagtaagtctagattcaagtggttagttcctaagttgtaagtctagatacacaagtaaacaggatacaggaattatgggccaccaagacctgagctataatttagccctttctttttttaacttcattatgtgaagatgcagtataaattattacttgagagctcttttgcattatccaatttcctgattaatgacatccatcctcttttagatggttttggcggctaacttgttggagggcatgataaaagctgagttcttgaagaacgattggtggtactggtcttccttcacagcagctatgaagacatcaactgtatcctcactcgcgctcagggtctacactctagatgattgtatcatctacagtaaggatcaagttccaagcgttgagccagctgacaatacaaggtctggaaacagaggtgggaggaggaggagagagcttgaatccttagcatcataatgtaggactctccgttgtagactccaaagttagaagcctctcgggcagcaaaagaatattatcctgctgtcaagtagatcgatgatagatgatacaaagtcttctgttatgtcgtcgcttaaggagggtagcgtggtagacatcgttccggtacccctgcaagagttcaaccctgactgtgttttcttttacctcgtatctaccagcctaccgtttttcgacttctgttgtggttttaggttccagaaggaagaattggtactccatgtgcgagcattcgatcttgatgccaccatgtaaattgtttgaggcacctgcaagtgctggcattttgatctgatccgccaggagtacccggtgcaattttctctgttggactaaccctattcattgtagaggttattccataggagatagaggagacatgtcaggtagggaggatatgtctcattttctacccactttcactctattagccgcagtgggtagtgtagcgggtgttagtttctcattctcatggtctgtacttatgtcgtgtttagggggggcgctctggggcgttgtattgatcatttgtttgatgtttctggcaagtttgcaacatctgataggaatgtagattcatcttgcgacagatataattttgattgtaactaaactgaactgaaaccaataatgattagtcaacaatgattcggctgcctgagcgagtggtcgtaatatctcactggtttctaattctgcaaattctgttttgcttatggtaacgaaaaatcccatcctgtgaaatcttcttctggttcattttagtgaaaaacggagattgtcaggatgggaaaggaacgaatgatgaaaaatcatctgcttctgatattgtttattgttgctactcttttaacttctttgtaattttctagcccaagaatgtatttttccttaattaaaaaaaatagcgaatgaaggttctaactcctaactgcataaaaaaagtatgttggtatgtggcatgtttgctacgttttcgtgtcctttttttggacgcatctccatgtcttcttagatgtagtagacgttgctgtggtgcacggacacggtgctctggtacttgatgtagcctctctgtttgggagactattgctttttgtttcatgtctttgagaaggaagcacgtgagtatttttcattaagagatgtatagtagtaccttgtgtattatgttactgtacatttccccccttttttttacaatgttgttactgtacttctcttcccgacaaaaaaataaataaatattactactttgatgtcattttagctcaagtggtaagaacacatgcgaaggaaacaaaataaaagatgtagtggaatgcgagagaaggctgaacattttggttttgtccagcacttgtctgaccttttttttttctgtatgttattacagtacaacggaagcagagtcatcctgctcctctttaagcataccactcacgtactttgctacaagcaaaaacacatcacgatatcctcctcacctcctccttgcccagatcacaccaattgccctagttttttcttcctgcagtgaccttacactgcactattttttacaatagcacataacagagaaaaaggcaaagaagaaaagaaaaagaaaagaaaagaaacagagaaaaatgagagtaaaaaaatgctgcatgatctttacttcaaactgatttatataactactagactcttgctgaagacatggtgaatttgaaggcggccgatctcgaaaatatatatatttgcttctcttctgttatgattgaggaacaattgtgccaacgtatccgataccgacgatgaagaacgccgcgccttggaagaagaggtagatgaagaaatggtccttcccgaatgcaagatcataccatccacaggagaagaggaatgccgccacgccgagctccgtgacgtttagcctgaaaaaagggaagaaattgtcactcgaaatcagtgaatcatgagctgagaaaacagttataaagatttggcagagtttttgttctgatcaatttttcttacctgtcccataccctcatgaacgatttcttggctgatgatttgcttgatgatttcatcttcagagcgttgccgagcttctcggtgacgacccattcgttcgccctaccggcttctaacaggccgatgagagtggcctttgttctatgcagtgacatgacattctcaaagaggatccagaagaaaagcaagtgaaaagacctgcaaacagttcaattccttgggttaactaaacatgcaatcaatcatgaactgttgattcaccaaaggagcattactgttgatcatattcaactaggattataataaaatcaaaagaaaatcttacctgggagttccaacggaattgagaagggtgatgattgtgggaatgtacacacagccccactttggtatcctgacctcagggacaaagatagttgccgggataatcaagcagtagaacgcaaaggtcacgatgtgcgcgatgattttgcggatcaaaaagaagttgtagatgacatgaatcttcttccagattgtcactttctgcaacaatgtcaataatagcatgttagatgccaacccaagaagctgcatggcttaaatttttctggatttcttggcactatgtttggggagaccttatttctcacaatctccatcagcatcttcctgaacaggtttgccggcccacatgaccacctgtgctgctgaaaccgaaaggctttgaaagtacttggcagctcacttttgacctgaaaacgacgcaattcttgttaaactcattttttttctctcttaggcaacatgaatcaatgtactatttcctcaagaaaaagaaaaagaagggaaatgcaatagcaacttagcaagagcaatgacaaaggatgcattggatgctatctcaagctgatcatgtgtaggatatccatgattggtgtgtacctgaacatctccaaggtagacaaacttccatcccttaagactcgccctgattgccagatccatgtcctccactgtggtccggtccttccatcctcccgcctcgtttaccgcggaaacgcgccacacaccagcagttcctgattgaaaattcaccgaatcaatcagcccttatgtataaaaatcataacatagaatgcatattctatatcctagaatcttcagagacaaagttcttggtgaagaacagatgaaattactgaaggttgaagcttaccattgaagccgaagaatgcgcagacagaggagctcacttcctgctccactgtgaagtggtaatccaaggacatctcctgcatccttgtcatcaagcactcatctgcattcactggtagaaacaaaagacagtatcaatatcattgtagttcaaagacaatgtcaacatcatatagttcaaagacaagatcaacatcatagctccatgagaaatacttgacaggtaacaactgtactatatacatcattaaaacaaagagacctggaaacagttctcagctaaccagactagtagcaaacattttactactgctacactgttgtgaagaaattgtgcaactgtggatgcctgcactgcactgtcctctgtagtaattatttatttgcttgtttctttatttttggcaggttttgtcctgtttcttctactactactgtattaagactagtactactaccactactactaaacagtaaccttgggcagtggccaatactaataatcaattggacccaaactactccacactaatctctgaatttagctgcaggatccaatgcacatcgcagcacaatttctgctcgtgccaaaactctggagatctcacatgccactgtcactgtactgctatgctttgataataattgcaacttgatcacaccactgttggagagaaggaccaattaagctggagcttcagagggcacggcccctaattaattactacactaatcgctgcagcatttgacagcaggacatggccggacctagggctcaaggatcaccgacgagatgggcccacccgtcacgtacacgccacatggtggcggcagtggcagcacgggtgggccccacgtcacagtgactgcagcgagatgggtcagctcagctcagctcagcttcagtgtcaggacaagctgctgctgtgctgacgtagccgccctgggacgcacagctcctctactgcatggaagccaaggaaggaatggggcttgtactttactttccttgtgtactcgtgtttgtgctagcgattggatcaatgctaatggaaatataattagttctaattaagtgaagaagatctttgcctttaccttgttaactatgcttactttagaggattttataggaaccaaatagaagaaggtgtttatatgaaccaactgatatcttttttttaaacgaatagcaccagacaatttgatgaatcatatagtgagaaaacgtttataagaccataatcctataatattttatattttataaaccaattgttaatttaggtctgaccttgtacaatcatgttagatatagagatcggattttaatttattataaataaaaaatgatattttaggtcatatgaccaaagttcagctcttactaactgtcggtcgggctatcgcgagtcgtcatagaagtacgaggcacgtggatcttctccatcatctttacttaatgaagtccacactgccacataccctaccaacaagtaccaactaaaccctaaaaaataatatgtgaacacaatttgcatcccggaagaaatgggacgcataattgccagacgcaatcaccgacgaccctccatgccgccgtgatcaccgacggcgatagcaacacccctggcccagccggtggagccagcaccgccggcgatcgtcggcgacacgcgcatatattccatcttaaaatataattatttagtattggatttaacatcacctaaatctatcggtcacatcatttcgtttatgcttatgtttattagttaatttcaatttttaatcttaaatttgtagttgatttcggagttttttcgtcaaagtttatttttcagcatttgcttttttatcgctaaaaatatgtatataaaaaatttatttataaattatttttcgttttcaaatatttcgtttggcatgaataagccaaacgatgagatcctaataaccatatttttgaacgaatgaggtagttgataatcatcatgatcggattgagagatccggctcgatacgattgatgagaagatctagcaagatgctggtagttgccagtacaatgctagtatgagacaagggcacgaggatcttaagcttatatactctagtagctgtcagaaatgtgcaacgtaccctgcacatgccccgtcagtaagtgacactcactctcactcgcccaaccaacaactcgatcgcacggcccagccattagatcacccataaatggcccagatcaactggacaatattccgactatataaaattcgcggaatatgagatcccttatttacccccaatcactcaccaaccgacaccacacgcaaatgtctagtcaacacgagatatagggggatgacatgtagagtcgggatagatatcgattatactatacttaccgaaacgccagcgggcctggacgagggcgatgtcggagttgtggacgaggaaggggatggtgcggcggaggaaatcagggtccggctggaagtcggcgtcgaagatggccacgtactcgcattcgcggacgtagccatgcttcatcccctccttgagtgcaccagccttgtaccccttgcggttctcccggatctggtacgttatgttcacccccttgtgggcccacctctcacactctatcctcaccatctcctgcaaaaagaaaatggccccacttgtcagccacatactgatctccacccaacaacaatttaatcacatcaatatgatattaacaacaaggtgaatttagtacttattactgcttggcttaacatgagaatgatacatggtaagttgcaagccaattgcagcttctgcatgggaccaaatggacaaattactagcatgcatgggccaacctagaaataagctgatgatgatggctatcctagcttagcttatagtactaattgacacaagttgtttaatatagctcttctaggccaagtatcttgtcttgtttatcgacagtaacagcacatacttatgcacactgttacccaattgtactactactactactactactacacctatctagtgctagtactgggaaaatagccagcgataacatggccgtttcagtgtacaacgtggcctgcacgccgcttacccattgatcccggtgatggcaagtgattagcagtaatgacaggcaggagtaaactactgcctagtgacatgattcttctgctgtcaggattcagtaagagataatctttaatttttcggttaaaaaaatgccatagctagtgtactgtttatcctcccctgaagtaaacctacttttcttgctcttccggccatctatacacaatataaaggcctagctgaaaatgagaattcacaccccaaaaaaaatccacatattccaaataaacctaaaaaacatgccggcttcatatttaaaccattttggaaataacaaactcgcagagttcccgccattttgcactaaaaaccagcacaaataaagacaatacgccccccactaaaatccacagaataaagaaccaaaaaacgcccccaaaaatccttcatatgcagtgatccatccacccccctgacgaatcgaatcctatggccacagcttccacccaaattctcaagctaaagcagtgatgaagagtgtgagagctactagcagctagccacacactgtactgtggcgtccgtactgtgatgtagggacggcaagcgggctaacccatgaacctgtttataggcaaaattactcgtaggttgcctactaatttaacttataaatagatttataggtcaaactacttatatctctaggtgtggtaaatccaatcatgatgtaaaaattcataggttaccacttatttatcgtataagtagattgccgggttcggttcgcttgcataccaactgtaatggtagcgtggcgagaggaggaaagagagaaagttggtcggaggctacagcggcagagtgccccagcttcacggcttttttttgcccttcctcccttccttttcaccaaaagagcaaaaagagacagcctcactccattgacgatttgactctcactcaccgacagcaagaggtttttttttttctttttcttcagtcttcctcaccgacaggtacacatggcgatggggttgagattaattacgctgctgctatgtaggctaggcctttcagtaattaagtgtatagtaggacaggagtagattagtaatttaattacagaggagtgaattattaggaggagtgtgtttttagtacgtaccttgatgacggggtcagtggagtcgtcgagcacctgcaccaccagccgatccgacggccacgatagcccgcacaccgccccgatcgacagctggtacacctacaccccccaacacgtacacaacacacagtaattaactgattaatattaccacgattacaatattcccatcgtgagtaagtaaaccaaaaaataattaatacttatgaagagtaagtaaatcagaatgagtaagtaaaccgaaaaacactaaaatataatcattataattccatcgtgagtaagtaaaacaaaaatatatataatttaataactatcatgagtaagtaaaccaaaaagtataataataataatgaataataattccgtataatctcatcgtgagtaagtaaacccctccacatctcgaagcaaaagaactcaaaaaaaaagagagagagaaagcaaagcaagcaagggaaggtggcggcaatggcggcgggagggagagggtacctcgcgctcgttgaacatggggatctggatgaggacgacggggaaggcggaggtgccgagctcggggtcgtcgtcggggatggggtcgcagcggtagcggcggtcggggcggcggcgcaggatcttgacgccggagatgaccaccgccatgtacatcctctccaggaacagcagcaccgacatggtcaggcacaccgccaccgccagcctcagcagcggcacgatcaccggcgccctcacctgcgaccacgcctccggcagccccgccgccccgccgccgttcacctccattcctcctcgccgccgctcgtcggtctccctccctctccgcgccggcgccgacgacgacgagacgaggcggaggagcgagcggaggaggcgcaattaatgggattggagagtggagtggtgggagagcgtgggagagagcgggggttttataaaatgatcccacgcacatgtactagtagggttttgtgtcactctctctctctctatctctctctctgtgcactcaccaagattaaaaaaaaatcccctccaaaatctactctactcttttttccaataaaaaatatttatctttttaggtcgatggaaaacggaatggtttatgtgaagtttccctcggtactaaatatgccgacatacgatggtcgaaacgacttaagttacacaaatagaaatagattgattatttatgtatggtttctcggttctaaatatgtcctgtgacagtcgaaacgactaaatttacacagagagtacaaatcggtaagaagtagaaatagactgatttctgtgaaaatttattggttttgagtaggtcatagaatcatccaatggtctaaatttaccactttgtttcaattttggcaaaaccatgaacctatccagcaagaaataattatgcatgtgaaagttgggctccaggagacgctccacagtgcaagggaaaaaggagaaaaaaaaatcacatgatacatgattgggtggtaatgtggtaataacattgcaaagtgtgttgaaggggggaggccatggctgtcgagtggggcccacagtgagggtgtcggtggtgaggagggtgtgcattaaacaaaaccaactggaggtcagtcagtttaatcaaggggtgtgtgtgaggtttcttgtgtggaggggttgagtggttactagtgatgatcaatcaatcttggggttgggttgcttatggctgctgcatgccacatttttagggttcctttggctttagccaaaagggcatatcatgcagcaaattggggagctttctgttactctaacagtgtggaaagagctgtaaatagatgagtgtactacaagggtcgaattcggcattgttcttttgtgcgggaactcgcacgggtgtatgtcatccaggtctccaaacttctgagtatcggaatggttacgttcgagctcttcttttagcaaatccaatgcttagcgttacacattttactacgagttgagacaacacagctgacgtagacatgaacaaagaacaacaagggaagagcatattcacaatgggaggatgggatctgacatcctacaacacattgtgagcttgtgttgcagccatgcatcccatgtggttttgtttgctggttcttctgacccaatctcaaataacaaaatgaaatgcacactgaactgaacaggcctcatgttcttcattcagtactgtcacaggctcacagttgggggaagaaagagacaaagcaacggaatttatttacagttcatgggcttttgtgcaaaatcagccaccatctgcagagagatatacggagggaaagctagacgactcccgccaaaaccgtcgcatcatgtgccagcgcttatcacgtgccacgacaccagtttcatgaaaaaaaaaagaaaaaaaaggagaaaaaaaatgagcaagctgataaatttttttggttgatgagaaatcaatggctgggtttacatgttgaccaaggcattattgcaagcgcaggagatatttctgaataatggtttggtagcaaatggtttgggacatgtacttggagccttcacagtaccagtttgcctagtctagctaggccctgtttttgatcattggatgcatattttttctttgcaaaatcacgagttccacataggggtctttaactaatatatgtgctatcttgcataagggagctacttctagctcttaagagcatcggatgaactaggactaacaatattggataaccgtctgggctcgtcagtatatggtaggatgtcagggttagtcgtcatagtgggttttgcttgggctccaaaaatattttcgagctcattattactcgagcgtatgtatcaccgtttctcgatgtggtttaaataattataaaaaaataccatataaaatgaataacataaataatttgtgtcacatatttttcgaaaaatatgtgatagtacaataatctaatagcaccgtcggttagccaacaaccaattgcatgtcagaatagcttattagagaaaaacaaaaatttatgtgtaaaatttttatatacgtgtgcacccttagcgacttaaaagccaatgaaaagaacacgttaaaaatactttaaaattaagttttacaatttaaattttggcaagggtttggctctttctagggcaaatgatggaaccttaaatcatcttttttttccctaaaattcactcgactatatatttagaccatataaaaatccatttctacaagtaccttacaccatgcccacacaaacatttattaaggcacaaagctaacaactttattatctctcttttggacatggcctacacacacacatacatagtccacaagacaaggcattaagggaggagaagacagtgcttcctccgacccggccacatgcagcttaatttcggctcctcttgccgcgccacaacatgcgcagctttacactacttcactcactaataaaccttccaaagtgatcactaaatcaattaattaatatagttgaatgatcctaaattggctttactaaagtacaatgcgattcaacgaagactagattgattattggtgattaattaattcgttgatgaaacccccaccattggtgacggcgccgattaacaaatcggcttttttctttctttctcccttcttctttgttggtacatggcagcaaaaaccgggtgttttgacggtaaccacgccatgatccccgctgcctaaccctaatgcatgaaaaatgaatggggtttgtgagacctactggggattgtgtagccacatggtgatcgatcgatcgagatctcgtttgggagaaacgccagctttcttgcttgcaaccgacacaatgcaaaacatgaacatgaataattaatggtctagaggactgttctccgtataaactttgtatatatacggtatttagatatacgatatgataatttgtgtaattatagtttgtttatttttattagattcgtgaaattagatttttaataggataaaccgtccgatgtagactaataggataaccgatattagaaacccaaatacgtactaactatgatgattgtacaacggtatcgttttccggccacccaaccatcccgagagtgaaaggatggtttaagatatcatgaaatgtaaacggcgaccgggaaacactcttcgtcgccctagggtcgacgacgtcacaactaactccgccactagtatcactcgcatcgttttctctactctttctctttgtctccgccttgtaaaaaccctacgtagcatctcctcctagatgctgacatcactgttcatgctctctctttagatctgatccggccagcaagaaaccgtcggtcgcccaagtcaactgcaaatgcaaattcagccaatgtgttgtgcaatttatggaaacaccacgggttgatgtggaatattcccttctacagcaacttccctgtcagtaatttactctccataggtatctctctatcttggcacccagtaattaatttatgttttgacagatgtactcccatgccaccaatttgcagtaaaattaactacttggaggtactagctagctagatgatctgatctgatgaatgatgcagttgacatttcactcctatttttttcccaaagttatgtatgagaattaattgttcagttcatggaagcaagaagagaccgacggtcacagcctcatctttttcttatgcttatacttattagctaaaatttaaattttcaacattaaatttaaagttgattttagggtttctttcatcgaaatttatttttcagtttttgtttttaggtcgctaagaacacatatataaaaattttattcacaaattgttttttatttgtaaatatgctatttcgcttattcctagagccgttttcggtgggctatgctgttttgcttgtacgtactaatgacttcactgtaccgtacaacatcgtttataagttccaagttgaaacaatggtaaccgtattttttgttattaatgacagaaactgcagcaatccggcaaaactattggcgatcgagaaggaaaaacaggcaaggaggttgcttgatcgatctgagctgacgaatcggcttctactactacttggctacatataaatgcagacatgaactactgaactgcagaatacttctctgcgagagtgtacctaattaagctgtattcgaatcttctgatcttctctgtaaattataagatacatagccctcttgcgtattgtcgaaaagaaaattctatctcgggtgctctaagcatgttctagcccaatgtaaataagttatgataagtatcagttgaccccaattgcagtattacagcagcagaacaggaagctctctgacgtcgagctccgaaacatgtgatcttgaacaattctttagctgaagattaatgtaagtcaaagaaagcgattaaacggtacgacggcatcgaaaagaatattgagttgtatgcaccaaccagttcggttatcccggaaaacttgaaccgacaagacaaaaaatgacgaacaaaacgttcaaatcttcagagatcgatgcttggcattgttcttcctccgatgcagtgatcgacacggcgtttctctgtcgaaaagggatcgatctaaagaagacaagcagagatgaacacgacctgcgaaaggtgacaccggtttacacgacgattcgctgtacagggtatatatctctgcatctcgatcgatttcaccgagtcacgaggctgtactgctgctgctggttcttcgctttggatcatcactgtcagagtctttggctagatttgcaagaaccaaagtgtgctctgacagcagtgagtgtgatgatgatgatgatgatagtggggatgagtacgtactgtatttacacagccccactttgtgcgctgcctgcaaaattccaggaccaagaaacagttgcctgctaattgccggaatttaatcgctcatttaatcaggcaggcagcacggcacaaagctgaccatcttgttcttgttcttgcaggtcaaacagctagtaaaaaaaaacactgtttttttaatcctgaaactctgaaaggctcggtgtcacatatacttggtgctgctaatcttcagactttcaggggaaaatcatgaatggtaggatgtgagagataatgctggattgcagatcaaagatgcagtgaaagatgggacaaggaaagttcagaaaagatcaaagagctttattctttccacatgaaagaacaagaactcagaccaacctagtactgtcactgctaaaaatcacgtgcaatgttctactaagttataactaacggtaaatacgatcaactgtagctcgtaaagaaactctgacgaggcagtaaacatttgcatatgcagatattactttcacctgagcacctgagctacagcattgtacaagcaagaacctgtacagggtatgctatgcaggagtggtcctgaactgtatgtatatatgtagctattgttctgcagcttctgaatatgtaccttggagacccagctccaccgtttgcttattggcttcagtcacagctaaaatttggattttaaagttgattttaatatttttaatcacaatttatttttcaatattacatttaagtcgataaaaatatatatatgtaaattttatttgtttgtttttttcacaatttatcaagtgtagaccaaattatgattaccagtagcagacataagcctagagcctgacccctaggtttgtctccaaaactcctactaaaatttatcaaaacttggcggagattttaaaaacacaaggtgtataagcaagttgagccctgctactgaagattttctgattttctggctccgcccctgatgatgatgatgatggtgatggatgacatggtgttggacccaaacagtgtgggctacaattaatacatatgtaatcagcttcttctaggttaattagagtggacgcatcaggaggaggaagagaaggaatcatggcacatggaagcacaggccccggaaatgccagatgccatgcgcaaagcgaggagatatgcatgagcactactatgagctttttggtcacccttttttctcgccggatttttgcggatacaaccttctcaaaaacctgaatttgcaaagataggcccctctcgcaaagagggaaatggccaaggggccacttatggcatattcgtgttgggtgctttcgcatcacttcgcaggtgacactgctgtgttaagcaagcacaatagttaagcctggggcatgtaagcttataggtaatacacgtacgtcatctaaagacacgttcatagaacaattgaggtattaaaagctttaactattaagtcaccaaaataatttttcattattcgcacttccttttacccacccacaagtaacaattttttcttttatcttaggcttagtcgtatttgtacgagcctagtatagtctcatactccctccatcccataatatagtaatctagtactggacgagacattttatattacaacgaatctggacagatgcatgtccagatttgttgtaatatgaaatgtcgcatccgatcctagattgttatattatgggactgagagagtagacaatacgtgttatctagagactcattcatataacagctgtgacaatcaaaggctctaaatattaaaccaccaaaataattttaattatttgtccttccttttgcccacatcacaaagaattttttaaaatcttaggcttaagaatcgtattgtatggctactaggctcataggcaatacacttcatctagagacatactacctccgtcccaaaataagtacagtcgtggatatccgtgcccaatgtttaaccgtccgtcttatttaaaaaatttatgaaaaaattgaaaatatttagtcacatataaagtactattcatgtttatcatctaatagcaataaaaatactaattataaaaaaattcaaataagacgaacggtcaaacgttaaacgtgaatagtgcaaaactgcacttattttgggacggatggagtagtcatcatacaagacaatcaaaacctctaaccatttagcctccaaaataattattaatcaactgtccttccttttacccaccctcacgtagcaaaattctttttatcagccttaagagtcgatttaagctcaatataaatatggagtcaaaatacaagttaattgttgttgtacatattctagtatattcttagggggtgtttggttcgagaagaaaaggggatacataaattaaacctaatggtagtgggaaatattgcgaccagagagcgagaggagtgatgcacaagggcattatacggcatatttctctttcctgaaaatgattcttaaaagtaagatttgtttttaggtacatgtgagatggggccactgtatgtctgtaggcagtgtaagtggcataacatatgcatgatgaatgattttgataaaaatattgaagaattttgttagtggccaattcaacaaactaataatgggcctcactgtagtctcttcggccctgggctctaagaaacagtagtgagtcttgtcggtggatggcccacaaaacaggttgggccagttgacctccatactgatacagcagaagtaacttctcaaaatctaagaactaacttgttgatagctagattttgagaatgtaaaagaaagaactgggtttttcagtttatacgttctagtctaagttctagattttataactaaagattttaagaatctaggtgaaaatcagcattatttggaagagttggagatttaagaagaagctatagctgctcctctaaacatggcctatacaactatgtttgacaatatactccctccatccaaaaaaaaaacggagagggtactttccaaaaaccataggccgtcgttgttgtgctagtacaaattcagtaaaaaaccataaattttctccacatttcaaacatggcctagcttaatttcccaattttctggtgcacgtgacgtaagcgatttcacagctttcatatctcgacatttcgtcaaacacatggtttgcaaatttcaacaaaaaaataaaagtagttttttttcttttgttattccgtcatttcgtcaagcacatggcatgcaacattcaaccgaaaaaaaacacacacaaaatttcctcttcacaacgacgacgctactcaccaacgcgcgagagcaacgggctgatcctgccattgttgccacctacgagagctcggattccatcttcagagcgccttgagcatctcctcggcgctgctggtggtgaaggcgccgccctcctcgaggttgagcaccttgacgacgccgtcgtcggcgaggagcgcgtagcggcgcgacctgacgccgagccccatgggcttgtcggagaggtccatctcgacgccgagcgcgcgcgtgagctccaggttgccgtcggagaggaggagcacgtcggcgtcgccgaggcccaggctctccttccacgcgcgcatcacgaacgcgtcgttcaccgacacgcaggcaatggcgtccacccccttggcgtggagctccccggccttctcgatgaaccccgggaggtgcttctgcgagcacgtcggcgtgaacgcgccgggcaccgcgaacagcaccgccttcctgcccgccgtcagctccgccaccgtcaccgtcttcagctcgccgtccgccgggtcgaagtaggacagcgtcgcgtcggggagcttgtctccgacggcgatggtcgccaccacggtggacgccgacgccgccgacctccgcgccgctctcgcccccgcggcgcggacgcctgttgcgagggggcgggaggagaaggagagggagaaggaggaggtgatgaagcgcttgccggaggtgacgctggcggtggagagggtggagagagctgctgcggtgggagcggccatggagggcggcgacggcgatgtgttcgaggaaatgcttctctgttgggatttggtttgggagtgcgcggcgcgacgcgagagataggaaatagtgggatttggttggtggggtggtgatggcgaggcggaaggaacgggtggacggcgtggtgttgcgctggattaggcgaggcagagccggcccacgggtctggtagcgacggcccaggactacagtgtcgggcctatttttgttgggccgaaacaggattgttcggcctgccttggtgattcgggttgggcctatgaaaatccagcccagttttccccgtttgactctgatggagttgaattttttttatttttaattttttttattaaaagttttacaaaaataattttctattttgaaaattgacggaagtagtcgcctaccgccctctgggaaggcgatttttaaaaatcgccctcccagagggcggcgaaaatgacgtggcagacggccgttcgctctcgggcgacggccgtcaacgaaatttgcaggcggcccccttgccgccctccgcgagggcgattttgtactgtgcggggggccgcctgcaaatgggcggcgaggggaggcatggaattttgcaggcggcccccttgccgccctcggcgagggcgattttgtactgtgcggggggccgcctgcaaatgggcggcgagggggcatggaattttgcaggcgacccccttgccgccctccgcaagggcgattttgtactgtgctctatatttttgtataaatatcaatagttatcaaatctttttatattgaaaactatacaagattaaaatctccaagactggtaaaatacaattttattattttttagggcatatttggattgttaccgtacaaatattttgttaccgtacaaatattttattaatttttagggcatatttggattgttagtgccaaatttttcttcacgaccaaatatttggtaaggtaaaattgcatttgatcatatttggtttgctgccaaaatgtaaaattgtagtgaagaatgttctacataatctcaaatctagattacgtattaccaatgaataggcttccattttcgtgtgttgtgtgctagtgggaaagaagatatgaagaggttgccttcagattgtcaattatatagcgtcgttttcactgcaatatatgtgaactcaatgagatacattattcattagatgtgacaagacgatcacgcgtgggcgtgattcactttatgtaaacaggcagcgccgaaagttgatagtgataactcgagctgccgcttttcatgtgtgctgttgtggactgtgcgcgctactggatctgacactaccgtgcagcgccgaaagtgtgttgtcgtgagcataagttgttctagcaccatatgaatgaaaagaactatgtagacgagacaaacacaagtagtactgcagtagtaatagcaaaagtagtactgctttacaagtttgtaagccaaaagaaacggtcacataaggactgaagaggtagaacactactgacgaggcctcttacccctgtccctcctaccctgcgccctaatgtgcccgtgggagtacgtgagtcggtccgggggtacggcacggccaacccgtcctgcctgtacaggtgtgacctctggctgctcctgagtgtgtgcctctggagctcctccaagctgagaggagcctagtacgtcgtggtggtctgcaccgtgcaagtcgtcgtcgtagaactggctagtaggaccagtcctaccggcgtgagacgaagaggccccagtaccgaagatcccggctgcaaatcctgctggacaaggaccatcagtttcgtacaggtatttaacagtattaataaaaagtaaagtaccgtgtgggcgagggatcgacgctccgtgagaggaagagctggcgaacgcgcccgaagaggtggcgaacgcccctgcggagctcgtggaagcgccggtcgtgcctgcgaacgcgctcgaaggcagacgaggtcctgcgatgaggaaacgtgcagttaaaacatggtgacataatcgtgcaaaagctgaaacaaaaatgaactaatatctaggctgaactgtaccgtgcgaaaccggtgctgtaggtcgcactgatccgaagctaggggcgctcgaaggcaaacgaggtcctgcgaggatggatcatcaagttacgacggggtgatgttttcgtacaaaaacagaaacaaaacttaagaaacctctgggctgagcagtaccgtgcgaaataggtgccgtaggtcgaggtcctgctccgacggtaggcgcgcgaggccgtggttgtaccggaccagctggaggtacgacgtccacagcgctgcgacaggagaagacgcgcatgaccgcacgcatcttctcctgcatccggtcgaaggtcaccctctgctcaacgtcagtcaagtgcaaacctctgttcaacctcacttggactgcggtgatatcggcactgatatcccgtgcggcatcagcctatgcaagatggaaataacaaattcagtagttgtcctatattatgcaagataaatgaaataattgtaagaagtaatacaaattggatgtaccgccacgaagtagtctcggtcacggtgcgtgggatacgcgtccgtgacagcggcaacgtgcggctctggggcgtctggagtgaaggtcacacgcgcacgagtgcgaggaaggtaccaacgaaggtagtcacggtagttctcctccgtgtgtgggaagagctcgttgatcacctcctctgtagctaacacccagtcgtcaacgtactgctgtacacgtggagcccaaagtgcgcctgctagctgtccccgtcgagtcaacctgtgaagagaggtaaattatatggctcgatgaagtaattatcataaaaatttagaaatgaacaatccgaactcacgagtggtcggcagggaggacggtcggctgcacgttgcccggaaacacctgcctaagtccgaactgtctcatcacacgctgcgggcagtgaggctcaacgaaaatgtcgaacaccatcggcaggatggtgagccagtaagcctggtcgcgtgtgcacaaggacgaaagtcctagcggtgctctcgcagcgacggcctcttctgtgtacggctcccagatgacgtcgctcggctggagacggtcaaactcgaacacgaagtccgggtaaccacgtctcacctggacgtgagcgtaacgacgctgcaataaacatgatcggaattagacatgttatgtgaagaaaaaaaaagacgactgataaacttataacgcagcgaagttgcactaaccccacgtcgacaccagtaagtccccatcgtgggaccgtcctctggccactgcgcgctgcgaccaaccccatagggtgcgctgtccaccactggtcgacctatggcaaacctctcggctgcccaaagctgaagcaacatagggcagccagcgatgatcgctcccgcgtcagtcttcgtgcacgcctcacagagggcacggtacgtggctgctagcacggcagaaccccagctccactgcggcacgtcctgtggctgagcatccgcgatgcaccgtgcgtagtggaccagccggaagtccacagcgtgcccgtgggtgctagtgaacatcacccacccgaacaaccacaacaggtacgcctcaagggagcgtcggaccgagtaatcatcagcgtcagggtgtagaatgaaatgttagtacaaaacactcattcggtcgcaaataagcacgtatgataataacaacttatttacttacagtgaactggagcaaccaagccttgctaggcccgactgtagagtacggaggaagggtggtggtcggtcctaggtgtggaaggcgcatcacctgctcgaagcgcgcagtgatatcctccttccacccaaaaacaccgtccacgggaccaactgctgctcccgccagcggtagcccgagcaggtacgacacgtcctgcagtgtcggagccatctccccacagggaaggtggaacgtgtgcgtctcaggtctccagcggtctacaagagcggcaaggagtgaccgatctgcatcccaccgcttcgctgggtcacggtcgtccgccgccgcctcaacaagcctacaaagtggtagaaggcctgccgcacgcaacctgtatagagcaaacttcaaacataagtacaacacaaagcaaagttgagttgaaatgtgaacatacgcgtaccaaggaacgtgacgggggtcgacacgcaaccactcgcgcgacgtgcgtggacggaaggtgccgagctgtgcaccctcgactgctgacaggaacgagcggtggttcctgtcaatcccacggttcaacagcgccggtgtgtcgtacgccatacctgcatcaaataggttgatcagaaacatataaataattagttcaacataagtaattagttcaacataagtaataaatgttgaactaagcgaattactaacacatattaaacaagagtacaaacaaacaaaagtgtttactccgaacactcatcacgataacattatgatacaacaccgaataattcgcaatactactagtacaacaatagtcggaggtactcattacaacaacattgaattgaaattacacgatagaagtatttagtccaaacactcattacatcacaacagcattttatttcctaaatcgaaagcattgttacaccatggaatcgcctgctgcgcgacgacgccttggccttgcgcgcctgcttgttgttccttcaccaggtggtcgcctaccatcacttgcctatccagatggactagcatctgcgccgcttggaacttctgcattcttcgggcatttcttgtaagtatggccgcgcagatcacacttgctgcagcgtaaagtcctcccacctgcttctgactcatccatatcatttctgatgcgtctagtttggcgtcgaccctttttcacccttaacttagatggatctggaatataaaaaacttgggcactcagcgttgtgtaagatcctgagatcccgaacccatatatctcctcactccatgtatgaaagattgcttctttcctgaaataatttgagacgtacacattgggagatatgccacaatcaccggcagcagcaagaacgtgtgagcaaggaaggtgatgaagcttcggcttcatacaactgcaggtacatccaccatccgccttcaagacacattcctgcacggcttgcttgcgatagataccacgcctgctcctatcaacacacattatttcataccgatgcacttgtgtgccttgagcaacaactcgatgtctccgtgcctttttgattttatcttccatgtactttgtcactacgttgccaaacactatgttgtcatcggccatggacggaccaattttcttgtatcgatccctaaagtacgcttgcgtgccgtgaaggatgaattcaacaatagcaaccaatggaagtacccgaactcctcgcattacccagttgtacacctctgccaaattggttgtcattatgccataccgagatccatcggtgtcgaacaatagagaccacttctccttaggctcattctcaatccactgagtgaaatttctgatggacgaccctgacctccttctcattgttggtgggtcatcatgtaatgcaccaagaggtatgggaggctcgtcaccttcaactagtggactgcgagattgctcatctgtttgcttcgttgtcaactcatccaacttgtcccacaactcattaaatttcttctcttggttctgtgcacagagcctcttaaagagctccataagatgcttgttcttgaattgcttgtagaaatttgcacccatgtgacgcatgcaccaccgactccgaacatcaggccacttagctggaagtcccttctcatcccaaccgttctgcaagtagtcaatagcccgcaacatacccgcatgacgatcatgtataaggcaaacgttgggcctcatacacaccactgcaatgtgcactctctctaggaaccagtaccagctttcagtgttctcactctctacaaatgcaaaagccataggtagaacctggttgttcccatcacacccaattgctgtcaatatctgacctcggtatttacctgtcataaaagttccatctatgcatagaacaggtcgacaatgcacaaaagcattgatgcaagcacccaatgagaaaaaggctctttgcagcacactctttgttcgatcatcaaccgatgtaaatgtatgtaggtcatagtacgtattattattcctctgggcaatggtggctaacaaacgaggcaaattatcataagaagcttcaaatgtgccatacctcatctcaatgatcttttgtttggctctccaggcctttgcatagcttatggtgtacttgaatttgttctcgatgtgcctaataattgattttggttcaaagccaatgttaccaacaacactgctgtacatctcacttgccacaaaagctgaagtgatgtttcggtgatacttctccaccccttgtaagtagcacttgtgctcggtcacaatgctaactttccaataatcattccatttacccttatatgcatggacacgccacggacaatcttccttcatgcacctcacttcatacacataatttgttgacttgaccaccctaaactctctctgcaaggaaactgcccaatgcttcaccgcctccttcctctcatccttatgagcatatcttgcaccctcaattacctcattctccttatactcccagggtacatgatcaccctctgatataacaagtccagagaagtcctcatttgcccaatcagtggccattacatcaccttcctcatcggatgatgcgtcgtcgtccacttcctcattatccgaatcttccctctccatttcatcaacaattataccgactctctccccctcatccgccatgcccatagcctgctcctcccttggttgattttcctcattttgcatcgatggtccaacaacatcccctgcattgataggaccctctacatcttcggtttgcattgaaacatttatatctttctcttgtaccgacacaaatataacgaggggccatgaccgttcaaaagccatttccacataccgtctccaagcatcagtgctgtccatcggcattagttcccaaaaataaccttctgttgcacgactcactacaactgacactgacattgtgtagacttcttggtctattctaaatcctctcaacaaccaactataaattgactgaaatgttctctccgcaggcctatcgatgcccttagatgtcattacaaaatctgacagatcaacaccatctggaccaaatctaatatttccttcaccgtgaactatctgaaatgtgaccttacttgacattgtgcctgatgaaaacaataactgcgttaacctcgcatttctgtactacgccctaagttacattctctacaatattgttctctaaatttctaaaattacgttacattctccagatcaaactaaactacatcttacaattaacactactgtctatgtctcaattcatactattatattctatgctctggatctacacatatgtgctgtgtgctacagatgtgctaaaatatatggaactaaaactaaaacgcaacatatatactcaaacataacatattagtacaaatgcacaaaagatgtatgggagcatacctgtgatgaattgagcgaaccagcagggcttcgccgctccccttctgctgccttcccctctctctcttttgttttttttggatttttagtgaatataatgaaatttcacagaggagggactgggctttatagggggagaggcaaaaatcgccctcccccagggcagcaagggggccgcctgcaaaattccatgccccctcgccgcccatttgcaggcggcccccccacagtacaaaatcgccctagcggagggcggcaagggggccgcctgcaaaattccatgcccccctcgccgcccatttgcaggcggccccccccacagtacaaaatcgccctagctgagggcggcaagggggccgcctgcaaaattccatgccccccctcgccgccaatttgcaggcggccccccgcacagtataaaatcgccctagcggagggcggcaagggggccgcctgcaaatttcgttgacggccgtcgcccgagagcgaacggccgtctgccacgtcattttcgccgccctctgagagggcgtcccagagggcggtaggcgactccttccgtcaattttcaaaatggaaaattatttttgtaaaacttttaataaaaaaaattataaataaaaaaaattcgatggagttgaggacgactaagtacggcagaaaaccgttaacgcgtgatttaatttagttttatttattttaaacttcaaaaattgtttgaaaaacattttcgcactaaatatactgcctaacagtttgaaaaatatgttaatgaaaatcgagaaaaaatatttatcttaatttgaaaagaataggaccgatggtcacctggtcatgtgagtagctgacacaagttcgcaaaacagatgttaaccgctcagttttctgtgttatcaattggatacgcattggtaaattttggcaaaattctgcaaactttgaataaaattcgagtagttatttatgaaccgccaaaacccgattacccaccaggtcaccacggatcaatttcgtatactttgacgatggcgacatctccaataactttatcagaaacagagataaatgaatggacacaaataagtacggaaagactagtgagcgaacattcgctcagcaggaatcttgtgaatggatatggacgaagaggactagaggacgcgccacgaggagtagaggatgcgcgaggaagctgtattgttctgttcccaattttccgtttttctcttttcacgtgatcctcctatatacgtatcaacatttttttgtttctttcacttttttttcatatttgtttttttgttagtctctttctagttttattaacggaactttttaatatgaatttttttgggactttctacatatatgaactttatatatatgaagcccaatatatagactttgcatatataaaatttttatgtagactttatatataaaaactttcaatatataaattttatatataaaaaagtttctatgtagactttatgtatataaactttctatagaatttatatttgcaattattagataatttagtgtattaactttaatataagagtaaagtgcattggcgatccttaatcttgtagagttgtgtcatataaatctctaaactctcaaaatgtatatccaggtcccagaacttgtcaaagtgtatcatctaggtcccaaatcgacacatcccctctaggatactatgtggcgctgatatggcatgccacatggatgtgacgtgttcttttctttttttttcttctttctttttctttttctttttcgttttcttcttattcttctttttttcctttcttctgctcaaggtcacaaagaaaaagataataaagggaaaaaagagaagaaaaaagaaaaaataaaaaaattaaatggatcctatttgtcagtcaaaataatcccacgtcatgtccgtgtggcatgccacatcaacgccgcataggatcctgaagtggttctggcgatttaggacccatatgacacactataacaagttctgggatttggatatacattttgaaagtttagggacctaaatgatacacccttataagtttaagggctgcccgtacactttaatcttaatataaataaaaaatgatgatcatgccacaccggatattttcccgaaaaaaatataatccaatcaaacaaatctcgtaagtacaaatagtggcggcatggatttggttattaacagaagaaacaaatactaatcacgtaattaggcaggaagagattgttatgccatgaaaaccgttcgtgaaatccgctcatctcgaacgttcgtgagctagaccagccccaaagtatgctcgagtgcttggttgaccgattagcacttcactaacatatttgctgtgactgaaaggaacttcactaatctattacttatcttttcgcttatacttatacttatctgctaaaatttaaatttttaattttaaaattagagttgattttgagggttttttcatcgaagtttatttttcagtttttgcttttagctcgctaagaacacatacataaaaattttatccataaattatttttagtttgcaaatatgctggcccataatgttccacccgacgtgatgactaaaacgtggacgaattgtcctcggactaacatacttcatctttcaaaatataagggtcccgttcgggtgcacgattgtagtcattgcaatgcagccatacaactgttacgctgacacacattactgtgaaagatagctgcaccgcagctcaaggagtgcagcaaaacacacccaagaaattttagaggaatgtgacatatacatactattaggatgtgtctagatttatggtatgtgtttaaattcatattactaaaatgtgtttagatttatagtacgtatcatatctctttaaaatttattatatttcaggatagagagaatattagcaaccatcttcatttaagtctaacagtcagacaaaggaacgaatccagcatggtccgcggttgcgcttgcgcgtcccgtgaagcaacctgaattcgctcggaaaaaatgggcgatgaccgagtttagttccaaatttcctctttcaacttttaacttttctatcacactaaaacttttctacacacataaacttcgaacttttctatcacatcgtttcaattttaatcaaacctttaattttagcgtgaactaaacacacacgacgtgactggactggagtggcctgtggaaacccatcatccccgtgttgctgcgtgtcccactgataacgggacggtctttgtgttgaccatttcccccgtactactcgctagcccttcggttctttgaccatttcccatgtactatgggctcgcccatttggtcttgtgttgctttgcgaagttgcagtgacaaatggaacccacagtgataaagttccacgggtttatttccaaacaagttttactactcggctaataatgacctgacgacgcgtaatttaaaaaacagaaaataatttgaaatatacaattcctatgtcctaaaatatggccttttaaaacttttacacgattttcgagatactactttgatgaaccatccttgtgtaaggataaggataaagatactttttacctgatcaatcttttttatattttttttgttattaatagttaattttaaaatgtctaatttagcactatctaaaaatatagttacattttgtgatagtgggggtatgatttatcatttatgtacttttattcttacctaaatgagaattaaaaagaaagacaaaaaaaatcctttaaatcaacttctaaaactatgccggttattactagctcacgacgtaccggatgcgacacgtttaggcaagtactcatcgatttcatgactaataggagtactccgcgtggtaaaatttatgaaaagtttatcaaagatccgtcgctgcatccccacatagaaaaatgtgccactagtttgactcgtcaccgttgacccaacttgtctccagctaaaccagcggaggacagcagccaacaaccacttaattacaaggcctcgccggagacggagacggagaccaatccgcccccgacctcgccgatggcggaaactccacgccgaatccgccgcggcggcgccgggctctcgctcgtcgtcgtcgccctcctcctcgccgtcgcggcgagggcgcagcaggagtacgaggcgaaccagcagaacgcctgctacgccaccaacgcgagctccaccctcggctacacctgcaacgccacctccgcctccgccgccgccgcggcgccctgcgacgcgtacctggtgttccgctcctccccgcccctctacgcctccgctgtctccatctcctacctcctcaacgtcgccgccgccgccgtcgccgactccaacgccgtcgacccggtcgcccccgtcgccgccgaccgcctcgtgctcgcgcccgtgccgtgcggctgctccccgggcggctactaccagcacaacgcctcccacaccatccgcgacaccggcgtcgagacctacttcatcatcgccaacctcacctaccagggcctctcgacgtgccaggctctcatcgcgcagaatcccctccacgacagccgcggcctcgtcgccggcgacaacctcaccgtcccgctccgctgcgcctgcccctcgccgccgcaggccgccgcgggcgtcaagcacatggtcacctacctcgtcacctggggcgacaccgtctccgccatcgccgcgcggttccgcgtcgacgcgcaggaggtgctcgacgccaacacgctcaccgagagctccatcatataccccttcaccacgctgctggtcccgctcaagaacgcgcccacgccggacatgctcgcgccgccggcccaggcgccgccgccccccgcgcccgcgccgccgcgggcgcagccgccgcctggtgggtcgggcagcgggaagggagtcgccgttggggtaggcgtcggttgcggcgttcttgcgttggcgggtgtctttggcttgctgttcttctgtctccggcggcgacgcggcgttggggaagaaagtgttcgtccggggaaggtggtcggcgacgtgtcctcttcggcggagtacggcgccctggcatcggggaagcagacgacgacggcaacctcgatgtcgtcgctgtccgcggcgaggtcgctgatggcgagcgaagtgcgcgaggcgttggagtcgctaacggtgtacaagtactcggagctggagaaggccacggcggggttctcggaggagcggagggtgcccggcaccgccgtgtaccgcggcgtgttcaacggcgatgcggcggcggtgaagcgtgtttccggcgacgtgagcggcgaggtcggcatcctgaagcgcgtgaaccactgcagcctgatccgcctctccggcctctgcgtccaccgcggcgacacctacctcgtcttcgagtacgccgagaacggcgcgctcagcgactggctccacggcggcgacgccgccaccggcgtcctggggtggaggcagcgcgtgcaggtggcgttcgacgtcgccgacgggctcaactacctccaccactacaccaacccgccatgtgtgcacaagaacatcaagagcagcaacatcctcctcgacgccgacctccacggcaagatgtccagcttcgggctagcccgcgcgctccccgcgggcgacggcgccgccgccgccgccgcgcagctgacgcgccacgtcgtgggcacccagggctacctctccccggagtacctcgagcacggcctcatcacgcccaagctcgacgtgttcgccttcggcgtcgtcctcctcgagctcctctccggcaaggaggcggcgtcctccggcgacggcgagaacggcgaggcgctgctgctgtgggagtccgcggcggaggcgctcgtcgacggcggcggcgaggacgcggggagcaacgtgcgcgcgttcatggacccgcggcttggcggcgactacccgctcgacctggccatggccgtggcgtcgctggcggcgcggtgcgtggcgaggcagcccgccgcgcggccggccatggacgaggtgttcgtctcgctcgcggcggtgtacggctccacggtggactggaacccctcggatcacggcaactccgggtcgtcgctgattgggaggtagcaaaacgaaccaaatcggtggcaaattcgattcaaatcgatgcgaaaagatcggaatttttcaaattgagttttgaatttgtagctgaaaatagtatttgtgttgcaattgatggtgcgaataaaaactgtcctcgagcagcagcgacaacttgacatgcttgactgagaaggagtacgatcgaattgtataagttttgagtcattataggtggttttgactgattctgtataagttttcgcaaatttggggacaaatatgattgcctataccatcgaattgctcatccctgttctctagagatgggccagtgcgtgggcttttataccaaacaaggcttacaatttacaagccgacctactactccgtctaaaaacaaatcctatctacgaacctgcacacgccctatctacgaacctgcatacgcatatatccagatctgtagttaggattagattatttttgagactagtactagtacttctttgattctttcgtttgaatttacggaatggattcaaatctcttgagggaattttcactcgtgtatattttgtttttttaaaagtttaatataaatacttatacaaatattttaaaaaatgataatgtatagtatagtgactatgcattgggaaaaaagagaaagacaaatctagatatgaatagtaccattattgttcatctgctgaatttgattcctttatacctcagcgtgtgggttgaatttgttttttttttaatatctccgtgatgttgtataatcgaaagcaatgcattttaagatagcacaatcaggggaaaagaacacttgatagggtgatttagcgggttagactaaatgattcccccaccaagattcagctaactaactctggttattgttgattgaaccacatgcttacttagcttaatctcttcccaaataatactcccgagatgggccgggatatgggtttcatcaaactacaaggccttacaaagtttgttccaaaccgcttccgtttacatttgcgttgcaatgttgactttcgtcattttaacgttgagccttaatagtccttaaatggttagactactataggagaaactttcacggttaagggtgtgttttcagctaagcttttctaacttctaatctactactccgtactatttttcacgcacatgcgccttcctaaactgaaaaactctacttcttttaataaaaataaaaatatagaggaaaattgctttgaaaaatcatattaattcattgtttaacttttttagctaataattaattaattatgtgctaatgagttatcatgttttgttgttttatgtgcgcaggagaaaggtttgaacaagcctatgatgcaagccaagtatggaacaagcctaagatgcaacatgcttgataatatatcatcattttgaggacttatgatcccctaaaaatcatgagtgattcgagatgaatcgtacttcagtgtcaagtatatgcaaacggagagaggatttcctttgagctaaggaattcattcatctttgggtctgtttagttcacgtcaaaattagaagtttggttgaaattgaaacgatgtgatggaaaagttaaaaatttatgtgtgtagtaaagttttaatgtgatagaaaaattgaaagtttaaagaaaaagtttggaactaaacaaggcctagtttacttcaaaattcgtcctgtttcttcctctcttttttttttgtttgtgagtacaaccaaacttgaggatgatatactggttcattctactttgcgcaaaacaagaaacggattcctactactacttcctactgcctcactactatgcctcctcttctactaagctcaacgccctcttcagcggagacctcgccgccgccgccgccgccggcgcggcgcctctcgccggactcaggaacacggcgaacacgccgagcgtctgctcgttcagcttctcgttgaacacgccgtcgacgtcgccgtcgccgtcgtctctgctttgcgcttgcgccggcatgacgtgcaccttcttcttctgcttcttgccgccgccttgccggtgtcgccgccgccgctgtggcctctcgccgacgagcgccaggctcgcgcggacggcgagcctgcccatgtcggcgctggacagcggccggccgagcatcgccctgggcagcacgaagtagagctcccccggccggagcggctcgccgggggacagcgccggcgggcggtcgtcgaagtagagcgcgtcggagttgcacacgaagaaggacgccgcgtcgtcgccgccgccgagcacgtcggagaccaccgcgacgcagggagaggccggcagctccctcagcgagccgtcggccgcgatcaccctcgccggcggcggcggcggcgccggagcttccgactcgacgacgatgtcactctccggccggtagatgcacgaaagcttcgatcccattgaaattttcgtgtgcttttgtgtgtgtttttgatgagattaaggagagttgagtctgaattttttattttgcaggtggattaaggatgaagaagatgtatttatagagtggcaaaagcaaagggttggaccgggtgtctttccattattcaaaacaaaatagatgatgcataattaattaattaaggatttgccgggactgatagggcactgatgaattttcattgaggatatttttttctttattaattgacacatctggattaaaaaaccttattgtagctaaatcactttttctagtaagaattggtgtggctaaacctctatatgtctataggcgtatagacatggtaaatgtgcgttaccaatttttttataactttaatactaaatgtgctagttttggttgaggtcaaccaattcgtagtgcccatattttatttggttcattctagaagtttattcaccacaatattaaatttggctttatattggtcacaatccaaacatacattagataactttaccttaccaattctttagtagtgccatagtttaccctgattttggcagtactaataatttcgtagggcagagaactaatatgctgatagttttaattttacgcctttgaaagaaaaaaaaaggaaaggagatgacttaatgcagaggaaatagccataccccatacctaggcatttattaatttggactcattaatgacaacccatgcaattagaaaatcattttatcttgagaaaataaatttgattgtgaattcatgtctgtatgacttcgtccgttatggtttcatattatacgtgttggtacatttttagtataaatttaataaaatgaaggatttacagcagcctctgtctctttaaacatagtttagaaatcatacttatgtccataggcgtgtggcctatttacgttataatgtgtgtgcatgtgcattcgtcttccctgaaatcaaagggaaaaaaacaagaagaaaatcctgtatcttataacaccttttgcattgtctaacatttggattcatttcaacaatgggtcacttctcatttcacaccccgttggttgttgggcaacttgggcaaagtgacttagagcatgctaattccatttccataccaacagtgcttaactactactcccatggcttatctaatcaacttgtatctgatcaacttgtataatcaactttgtgtaaaatcatgcttttcaattcaagaagcaagactatcacgtttgcttcgacaggtaagtcgacggatcacgcgtacgtatccatgatgtgtgcatacagattaatcttctaatctttcgtgtgtatacagattttcagacagcatcagtcctaactgaaatttttaaagaacttttgctaattgatgcaggcatgtcttcacaagttttggtcagtctgatggtcctactctttgtacctgagaacacttgattttagagtatctctcatcttaattatgaacaagctacatcttaatctagattaattaactacatgacacactgaccaattggctaagagcaagttcaatagtatagctaactactagctccaattcatctagagccaatctaatagctcatttatataatagttacataccacactattaatatatagtcccacctgtcatagacatactgcgacttggagtccgtgctacagctagctacaaatctgtagcccgctacttttctctctcctgatttatctccttaaaatatatttgcagctggctctaattacgagtctctgattgcaggtacacaagcgcgtatgcttgtttattcccacacttgatgctgaatttttccagtattctcccgagtcagtggtaagtctatctccttttctctttatcctttcctcttcctttaatcattttccccttattcatgaaactttataacttatcatttctttcaatgaaatgactattagataggctctaccttcttatattaaaaaaaatgtcagtggtcagtcatgcaaccatttcctatttcagagtgttgggtgcagaaaaatgctgataagttgagaagatcaccaaccaaacaccaccaatccaagctttcatactctccttttgtccgtctctctattttcactcatttgctacctgcttagttttaatcatgcaatctacagaggacaaaagaggagacaaactgaattagttaaggttcagaagctgatcagtgccactatttttctccacaggatcatccatgtcgtcgacctacctcgatgcacatttggaattaggacacataattgcagctggtagttgtcataatcaatcaagaaattgcttaacacagaagattaaagtaggtgtatagccattagttagccacatgaggcaggccgagatgaagccttcatcagtgcaaagctctgatctaatcattgacgccatcagtctttcagtcgtcgcatgcatgcatcgttagtcatcaagtaaagcaaggatttcatacaataatcaccaaaacagttgattgcaacacgatctgggggcatagctaactgacgaactttgactgatcagtggataaaacggccactgattgccaaattaattcgtcatttgttaatgctttcactgaccatgacttcttcctatctgcttctaattttgacgtttctggcatcatctcaattagcatcgctccttggagatcagtacaataaattaatctttttgtgttgattaccgtacttaggggtcgttaattactacccgagattggcacttcccttagcaagaccagagtggcttgaaatttccaagaaactctctttctggtgaatattttgaccgattcttttacttatctcgtcgggaaatagagagcaccgatgcatacggcatctgaaaaggagtagaatataatcttctagtgcatttttcttccctggagaatgtaaaaaatgcaaggataataaaattaaaagggagttgagaccaaactgtccttatcaaactgatggacctatcgttatactggagattctcatgaggtggtaacctggtaaaatactgtgttattttcacccacatctgcaaaaacgtattctaacacttgcgcaaagagacagaagctaatgtcaaattcatgacctcgctaaattcctattaatagcataaccgggtgtgcttaatattatgtgtacctggatttaaatcttgatggttggagtatctactacatttgataatatttaaggtcattatttactgcatgatcatagtatcatattatgcagtaaatcatgaaaattgtgtgtgtaaatgactaaattgcaaaattattgcaaaaagaaaataaaaacctgttcaatttgcccattgtaaatgagtccgagccagttaatttataactgcaacatgagtaaattgcttacatttttcctagtaccttaggctatatttggtttaggattttaagggctggattggaggatttttttttcgaacgcgcaaaatagttatacatcaatatgttagaataaaaagagtttttgttacacaacgcaattggccacacaggcctatgttgggggtgaagaaagaaaaaaaccaaaaggtaaaaggaaaggaaaaaactattgcgaaacaaaggctactccaaacaaacgagaggtaggacggagccacactacactcctagcaaaccctcaaaagctgtaatgcctgcggaaaaccacagacaaccttccgagtggatagactctataaacacagaaaccgaggaaagggccgagtcgaaaaccctagagtttcgttacttccacagctgccaagagatcagtaggactagggagtcgaagcatgcgcgaagatgcttaggtaagcaagtcctaccagacgaccaccagtccttaagcaaattgccaccggagaggagggcagtccagccctcaggtgacaaaacatggtgttaggtctgtcaagggaacacacagtcgaggagaatgtggttcgccgtctcaaactcctgagcgcaaaagggacagacatagtggctatcaataccacgcttttgaaaaagatcagctgtccagcaacgctgctgatatgcaaaccgaagaaagaatttgcatttggcatggcctttcgcgtgccagagcaggttggcacaggcaaatgagtgctagccaaagaagaatgcctgttatgctgagcgcgccaagtaacactgatcactcgtccaacaccaaacgaaacgatcctcaacgcccgataagagctaggtaggaagcaccgcatcccaaactagaagcaactgagagatgaccgtaggtgttaatatgcataggattggaggattaatatgctaagcatgtcagtaggtgttaattaccctgtttaatcccctttttgcagtggaattgaagtttgagtttcttattgggtagactgaaaagttagtagcagcatttcgatcgtcagtgttttactgattgcacgattattgcagtgcgtcaggagattgaaagtttccattaactgcaatctatagcagctgggaaatgtacataaaaatacaaaatcaacttttatatattcttgtaggtttgtatgattgtatctacagattgaagtagtatttacaaggggtgatcatgcatggatctcttctccccgggtatttttttcccttctaaatctagtctagtattgaacaaattaattaaagctttaaacttgtgttaagctctaagcttctgaaaaaaaatacgaaaaaattgtttcccctaaaaagaagggggacaaaaagctgaatcttcatctatcttcactcggcgtcctcttggatgatgctcagcacgcgcttcagccgcgaacgcgccgccgcggcgagcttctcgccgccgctcttcggcgggctccacgacgccgggaactcacccagcgtccgctcgttgagcttctcgtggagcaggacgtcgccgccgtcgagccgctcgtcccgcagcggcgtgacgcgcaccgtcttcctcttcctgtcgccgccgccgcggcgaacccctcggcgtcgcggcgccttggcggccgcggccgcgagcgcggcgctcgcgcgcaccgccagcgcggccatgtcggcggtggatagcggctgcccgagcatcgccgccgggagaacgaagtaaatctgccccggccggagcgcctcccccggcgccagcgccggcggctgctcgttgaagtagagcgcgtcggagttgcacacgaagaaggaccggccctcgccctcgccgcggagcacgtcggcgacggcggaagagacggccagctccttgagtgagccgtcggcggtgatgaccctggccggcgccggcgccggctggtgcgacgacgagcgtcgccggcagctgatgcaggaaagcttcaatcccatgaaatcttggcgaaaatgttggaattttctattgctggtttggaggttggatgcgtagactgaaaatggatggtgtatatatagagtgcgaaatgggggaagtgatgagtttgtttcgtttaagcccctttcctcttgggaaattatatgaacaaaataagtttcttactttttttaaaaaaaacataatttcttactttttgcctttttggtcaagtattgtggttagtagactgaatgatgcagatgtaagtaaggttatgagataactgaatataataagttactccctccgtcccataatataagggattttgagtttttgtttgcattgtttgacccctcgtcttattcaaaaaacttgtgcaaatataaaaaacgaaaagttgtgcttaaattactttggataataaagtaagtcacaaaaaaataaataataattccaaaattttttgaataagacgagtgatcaaacaatgcaagcaaaaactcaaaattctttatattatgagacgaagggagtatgctactatcatgagtgttgatatgaataattcttaattacaacttggaaaccagtataaattaaattaagatatctgctatatttgtcggatgctctaatagatagacccgctcacggaacaagatgagcttgtttggattgaaacaatttttaccctaaatagatagaactactgaatttgaactattatagataaaatttggtatcaaaaccaaacatgcatttgacactattgaagttaccaaaaattttagtagcagaaaaaattagcatcaacctaaactagcccaatgatatagtgattagtgatggattactagtccatactctctaaaataactttattttaactctactttttctcccaaaataaattcacatttatcttctacttattatcgatccacaaatcagattaccttcaatatactttacggccgggcaccttatatacttgctttaccagtactactttcttattaatgataagcactttgattctttttaaaattttatcttgtttaaaacacacaagagtaaaaatgttatcctgcgatggaaggagtatactatagttatactccctccgtccctaaatgtttgacgctgttgactgttttaaacatgtttgatcatttgtcttattaaaaaaaagtaattattaattctttttctatcatttgattcattgttaaatatatttttatgtatacatataattttacatatttcataaaagtttttgaataaaacaaatggtcaaatatgtttaaaaaaatcaacaacgtcaaatatttaggtactgagggagtatatactttcatcatcaaaagataacgccggtaaagaatagaaacaaactatatagtactatacactaccacagggcattgagatcctttgcagtcgactgcaccgtgcctttatcactgacgtatgggcccgacgacacatcggacccacatgtcagtgacaaaggcacggtgcagtgacggcaaaggatgttgatccttctacagggtggttcgtctgcctgtcacggtatcatagctagtaatgtgttcgaccctgtagatgcttgttgctaggcatccatatgaggctgggttagtttgttcacttttccaacttcagcttactctttttcacacatttttcaaaccgctaaataattttttttaaaaaatatatatacgaaagttgctttaaaaaccatattaatctatttttaaaaataaaatagataatactccgtatttaattaatcatatacgtgagttacgttgttttgcaagtgagagattagttcccaactgcgttgttgtactgtgtaatttattttttttaaaaaaaagaactgagcactagtcctacggaactgcccaactggttctactccagaagcaattgagaaaaagcacatccggtccagtccagcaccagcaggcaaaaaaaaaaaatgtcacttgtgaagggaccagtaggcaaaaaaaaaaaaaggggatacaggtcaacagaaaccgccaccgatcgagtggcgtcaggtgtgagcgctgacggacgattccgcggggcaacaaacctgaagacggcagcgcccagcagcagcggccacacgctcccctcccacagaatgcgaatccgaacccagtggtgtgtggggggattcggcacggcgcgcgaggcccacctgtcagttgttcgccgcctccctactggggcccacctgtcagcgacgcgatcctctctgccttcccgtccgtacagcgcgtgcgctcgctacttcgttgttcgttcctgcctgcctcgtccgttcaaaattagatgttcaaacttgggacgaaattagatgttcaaaattgggtactttctccactgaccccatatatgtacgtccttgttatattttggaatgaatgagtaataactgttttttttctaagagcaagctagctattactactagtagttagtatttaatttgagtattagaagtatggtagttctgcttttgtttcacaatcttaattgctcaagggaattagatattttgggtagttgtacctccttaaaatatttcataataggacactgtatatgttctgaaggattggcaatctatcaattccacatctcaatagatcattatcaagaggttcagatttttcaacatacgtaagaggaacagacattctttgaacttgcttgttgtcacttaagggtgttccaactttaccgtgaaactaattcttccaaacccttcaatataatccgaatcatgttcgtggagaaaagaactatcgaaactaagctctatttaagtgctctactgctcttacatgaaagattattctaggtttcatattcgcgaaattttattttattttataggtttcttcattgtacctacttacgtctccatcgcctatattcctattccctccgtccaaaaaaaagccaacataggagagatctccttccagtacaacgaatctgccttttatccatattcattgtattaggagggatcatatcttctcagaggttggtttttgacggagggagtagctttcaactcgttgccttcgcccctccgacacacattcggatgcagcttgttatacagttctacagacaaatcacatcttgtaaaatatctttttcttttagctagaattactcctatcttggaaaagatcaaactaagttctatccagagcgccggccttttggactaatccactatagtgtacagtactgattaccgatcatgcaggaaattgaccttgttgtgagtgagtatagtactgtagtactaatcaataacctgattacttggccggccggtcgatcagtcatgatcatatcagttagtgatggagaccgatcgagtaatgctgcaacatcctgcgtatctttttcgtcgctgactgaaatagctgcctttctattcaagtacacagtcaaacaagtgctacttcccgagcttatctagggacaaattaactgcttgacttcttaatggaaaaattgtccctacaaagtaggagtattgaggaatggtttaccatagttacaaaaatcttaatcaaatttgtttaccatagttacagcaatcttaatcaaacgtttgcctaataaaatatgatacgcctaatattccgtgctgcatactgtgacaacgaaaacatactgataattaatctagtgtatatttcagcctgacaagtggggaatttggtagcactgtccaaatcaattgtcatcgtctagaattcaatcaattcttcggcatgaagcaagccataatattctctcagtttcaaaatacacttgtccaaacatataactagaaatgcttgcgtatattttagaacaggtagttactccctccgccccataatattttaatgagagagataaagaggtgaagaaaccatttcttatgcaagaaaccatctctacacaagtataaagaatgaaaacaagagaatatgtggataaaagaagagagaagggagatgattggatgagaattttattttaagaaaccatccattatatatatatagtttctatgtataatatctatatgatatggcaaatatgaaaactaattaatagtttctgggttgggaattgtctaacgagtggagtggattggagtaaaaggcagactggaaatttggtaagaacatttcgattatcaaggggttcacttatttcacaattattgcaaatgatgtcaggataatacaaagttcgactgtgatcgcgaggaaaatgacactaactggcaccatgtagcttctgttctacacagcctgaattaattccttaattctccatctttctatgtaaccagcagaaaatcagagtctgggaaatgtacatcaggaaaaattgtacaaagatcaactttttttttacatttttgtagttttgcaactacagattgaagtcgtatatacaagagggtgattcatccatgaatctttttccccagtattcttttctttctaaatctactaattaaacatactccatccgtttcaaaatgtttgacaccgttgactttttagcacatgtttgaccgtttgtcttattcaaaataatttgtaaaatatgtaaaactatatatgtacatgaaaatatatttaacaatgaatcaaatgatatgaaaagaataaataattacttaaatttttttaataagacgaatggtcaaacacgtaataaaaagtctaacggtgtcaaacattctgaaacattctgaaacagagcaagtattaattaaagctttaagcatgtattgggcttcgagcttctgaaaaaaaattgtttccccaaaaaagaagtggaaaaaattgaatatttatgcatcctcttggatgatgctcagcacgcgcttcaaccgcgaccgcgccgccgcggcgagcttctcgccgccgctcttcggcgggctccacgacgccgggaactcacccagagtccgctcgttgagcttctcgtggagcaggacgtcgccgccgtcgaggccctcgtcccgcagcggcgtgacgcgcaccgtcttcatcttcctgtcgccgccgcggcgagcccctcggcggcgcggcgccttgacggcagcgagcgcggcgctcgcgcgcaccgccagcgcggccatgtcggcggtggacagcggctgcccgagcatcgccgccgggagcacgaagtatatctgccccggccggagcgcctcccccggcgccatcgccggcggctgctcgttgaagtagagcgtgtcggagttgcacacgaagaaggactcgccctcgccgcggagcacgtcggcgacggcgggagaggcggccgcatggagctccttgagcgagccgtcggcggcgatgaccctggccggcgccggcaccggcgagccgcgtcgccggctgatgcaagaaagcttcaatcccatgggaattaatgttggcgaaaatgttggaattttctattgctagttcggaggttggatgcgtagactgaaaatggatggatggtgtatatatagagtgcgaaatggggaaagtgatgagtttgtttcgtttaagccccttgattcttgggaaattatggagaaaataattttctttacttttttggtcaagtattgtggttagtcgactggatgatgtagatgtaagttatgagactaatagccctgctcatggaacgagacgatattttttaagagtgattagtgatggattactagtccatactctctaaaataacttcgttttttgaactctaacttttcttaaaaatatgttcacatttatctcatatctacccttatctgcaaatcagattatcttcaatatactttacatgtgattttttttcttttaccttgttttaaacaaacgagactaaaaaaagttattttgagatggaaaaagtacgtaactattaatatagagcactatacacttagggttcttcactttgatgtctaaatcaaccgcaccaaatttaaattttggtaatgctgaattttggcattgttaatatttgttaaggttgaaaggtgtaaattaagtttggtttgttatcattgccaaatttgcgtgagaggaagattctaaaattaccagaatttggtaatggagataaattaatttatcaatgttagattgttaccttgtcaaatttggatagaaaccaaaacttggtaggattaattttgataacaagatgaacatcttcttaacttgctattagttaatgtactccaacactactacacggctgctcgactgcctgtattagctacagtgtcacagctactactatcatgtgttcgatacggacatggatcctatgcagtactgcagctgcggtagaagccgctaacatatgggtccggttctacctatcagccacgactactgtagctatattactgtagacaattttcactgattcgatatcgcagatgcgcgttgcttggcagccatatctgagccgtacgggacagccccactgcttctagaagcaattgaggaaagaaaagcaccagcagtttgaccttcttgtttggtgtctggctccacaaaatggcacttgtgaagggaccagaaggcaaaaaaacgtgagacaagtcaacacaaaagccgtggactcgtttgtgtcaggtcaggtgtgacggtgtgagcgcctgagctctgacgattccgcggctaaaaaaaaaaaaaaacatacgaagacggcagcagcagcagcggcgaccacacgctcggacgctcccctcccacagaatgcgaacccgccttctagtgaagtaacggcggggcccacctgccagtagctcgcggggccgctccccgcctctactgggggcccacctggcagtgactctgtccgtcccgcgtggcgactggcgatgcagccctgcgggcgtcagcgcgggcgctaggctggtttgctgttgcgggcggcccaagcgagagagtggggtggggtgaccggacttttcctgcgccaacggcgcgtcgcgtcggaactcggaacttgttctaccgtgtcgcgttcgctgccgcgttcttgcctcgtccgttcgctaattttgaaaagcccggacgaaattagaaattaggttttcaacattagaaccttctgcactgacctacatatatatggatacttcctttgtactatcaaaataaatcgcgtgttcatgtttattcataggattgatttatttgggacataagacgtatgtcttattaggttgctatatttttaaacgaaagagtaactactattagcttttttcttaagagtaagctattagtttattagttagtttcagtattactctctccatttcaggttataagatattttaactttggttaaagtcaaattgtttcaaatttgactaaatttatagccaaatataataatatttataatactaaattagtttcatcaaatcaataattaaatatatttttatagtaaatttgtcttgggttgaaaatgttactacttttttctataaatttaattatacttaaagcaatttgactttgatcaaagtcaaaacgttttataacctgaaacggagggagtacaagtcaggtagttctaattctgtttcacggtcttaattgctaaaaggaattagatctttttagagtagttgtacctccttaaaatcttccataataggaagatatatactctgaaaaggataccattctcttaatttcatatctcaatagatttatcaagagactcgaagttttaaatgtcaagagaaccatatgtaccttccttgagcgtgcttgttgtcactcaagggtgttccaactttagcacgaaactaattcttccaatcccctacaatataatccgaatcttgttcgtggagaaaagaattatccaagctactgctccgtaaaaaaaaaacaaattcatacctacgatcgaacttggacacacatgtgtgtaggattgtaggtatgattttatcttttttttttacggaggggtaagctctaaataacgctcctacacgaaagattattctgggttccgtgttcgcgatttttttttttttttgggtttcttcctcgtacctacttcctcgtaatcctagctttcaattcgttgccgtcgcccctccgacacagtacattcgcatgcagcttgttatacagttctacagacaaatcacatcctggaaaagatctttttcttttagctagaattactcctatcttggaaaagatcaaactaagttctatccagagcgccggccttttggactaatccactatagtgtacagtactgattaccgatcatgcatgcaggaaattgaccttttagtttcagctggctgatcagaacctaaacagctactgtaattaattaataacctgattacttggccggtcatccagtcatgatcatatcagttagtgatggagaccgatcgagtaatgctgcaacatcatgcgtatctttttcgttgctgactgaaatagctgcctttctatatattcaagtaagtaaacatggtcaaacaagtgctacttaccgagcttatctagggacaaacttaactgcttgacttcttaatggaaaaaatatcactacaaagcagaactattgaggagtggtttaccatagttacaacaatcttaggggttgtttagttggttgccacactttgccacgccaaactttagccatgccacaattttttaggcatgtatttgtttcgctgccgcaattgtatatattataccacactttcttaactttggaatccacacgtcatgttctcaaatttagagctaagcataccgtacttgtgacaaattatttctaaaccacgcttattccaccatgccacagctagtctaaacttagttatatcaaggttaggcatcaaccaaacatcctcttaatcaaaggtgtttaccatagttacagcaatcttaatcaaacgttttgcctaataaaatattatgcgcctaatattccgtgttgcaaactgtgacagcgaacaaatactgataattaatctggtgtatatttcagcctgggcaagtgggcatatgctactgcatgcgtacgtgcggacgtgcctcccagggaatttggtagcactgtccaaatcaattgtgtcatcgtctagaattcaataaattcttcggcatgaagcaagccctactattctctccgttataaaatacaggtacataactagaaatgcttgtgtatattttcaaatagaagagtgtgtatctaagtagaaggtggcttttcttctgctctactcccttcggtttcattttaattaacgctttggacaatgacacgctctacaagatatatctttgaccttatttttctattatctctactacttaaaaaataagaggtacctccatcgtccgtcaaaaaaaccgggtgaaaaccgggcagaaaaaaccaggtttgtccgataaataaaccggacaaaaaaaagaagtccggtccagaaaataagggcgaaaaaaaacaaaaaaaacggatggaaaaaaccaggtttatccgataaaaaaaccgggcaaaaaaaaagtgcgaaaaaaagaagtccgatccagaaaaaaggcaaaaaaaaaaccaaagttatccataaaaaaagggacaaaaaaaaggaagtccgatccaaaaaaaaagggcaaaaaaaaccaaaaaaaccagaagtccgatcagaaaaaagggaaaaaaaaccaaaagttatccgatcaaaaaaaaattccatcgacgcggtaaaagaaaaaaatttgtccgattccacaaaaataggaaacaaactcccatccgttttcgtttgggctgattagcgaaaaaaataaaataaaaagtccgactcctatatccgattccctctcataaaccaaaaaaaaagttcgactctagattggtgaaaaaattgatgtgccggattgaagatctgtttgcaaaaatgaaacctacaagtcgagatcattccatttttatatgattttaatttttgggtttgtactttttgcatttgagtccctgtaatttttatatttacatttgagtccctaatatcttgcaataaggtacttgaggtcatttttattaaaaaaataataaaagagagataacaaaggcagaaaggtgcataaaaagaaaaaggctcagtctttcagatgtgctcatagcggtagggtgtgcgtgtgtgcgttcataggggtgagtgtgcgcacgttgtgagcgcctgcgtacgtactgtgtttctcaaaaaaaaagaaaaaagaaaaaggaaagccttaaaaaaagaaaataaagaaaaacaacaagaataaaagtatttttcccctaagtggcgaaaaaaactgtagatccgaatggaaaaaaaattgattcatagaaaaggcaaaaaaaaaaagtggtgaaaaaaagctagatacaattcctttaaaaacgaaaaaaaaatgaaaaaacatctaaaaaaagttcgtccgatttcctaagaaagtggcgaaaaaaatggttcgtataaaataaaaaatacacacaagaaaaaaatggaaagggtgaaacaaaatccgagttctaaccagtatatatctcttctctatctctaatctaatcgaactatttaaaaagaaaaaatgaatgagaaaataaaaacggttcaaaaaacccgtgaggcaaaagtcagaaaaaaagcgtaaaaaacacgctaaaaaggtcttccatcttcaataaaaaaatgcgcgagaaaaattatttccatcatcggtaaaaatattttaaaaacaacatgcgaggaaaaaaaactgctagaaaaaacgtgccatttctaaaagtttggttttaaaaaaccgcgcgaaaaaaacaccgtctactaaaaaataaatcgctctgaaaaaactgttagaaaaaagctaaattgatagacacttgagtcggataggatccatcaattttttgccatctactacatggctttatttcgtcatacattctactgtattggaaaaaaaagtaaaaaagaacattcgaaaataacaagaaaaaaaacgtgcgagaaaataggcaaaaaaacatacgagaaaagaaaagcataaaagggagaaaaatatggttttctttgtcagtaaaataagcaaaaataaaacatgctaggaaaaatttgttataaagaaatgcgccatttctgaaaaatggattgagaaaatcgcgcaagaaaaaaaaacaatgtttataaaaaaagccgctcattaaaatagaaacattgtcattgacatgattatgcatgaaaaacatatattatcaataaaaaattttacccgttgcaacgcacgggcatttttgctagtaatatatacaataaataaatgcatgtttacttttattatagtgttttgaaagacaaatctatatatgtttttctagtttctttaaattagatatttttaaagttattgatggtcaaagttataaaagtttaacctcaaccttatccaaaacgtcaattattatagaaccagagggagtatttaataaaaggcacaatcttgtgttgttttttcttaggaaacaaaaggtagatggtggcttgtagctagctgcttaattaggaagaatagattctttcttttgcccaactaatactataggtctatagcatgcaatcaagcagaaaaaaaattatatgcatataggaaatcaagaaatttgactacactgcacaacatacctagagccgttatcttaaaaaaaagaagtattttgaattatccccacgagacagaactatcacatcatcgtatctatccattatattactacataatagatttagcaaattttggggaaaaaaaatactaacactattcccccttcaaccaaaacggtttagtgtttttggtttctacaaatgaatatggaacacatgtacttttaatgtagagacaaaaacagagttgtgcaacaaatacaattccgctctaagatatacataacatagcacagtcacacgggaaattcaaattctcgaggataaatgtcatcaaaatgtctagattcttacccaccattaatcaaaatgtagctagcatacatgcatgcaagcgaatttcaccacagaaaatttaaccaaccaagttcccattctctgtaaaaaaaattaaaataaaaatcgggtgattcagacctcgcatgcagctaccaccaccaccagcatgcaacgacgacgacgacgacgacgacggcgagcatctcctccgccaccgccatcgtcatcagaagaacggcgaccgctccggcgcgcggtgcgcgcccttcctagcgcgccgccggtagctgttggggtcggcggcggaggcggccggcaccgaccgcgccgcggcggcggcgaaggcgaggatgttggcggcggcctcctgatcctcttccttgtcgcctctagccacccggcgtcctcctctcctaggtcgcgacgacgacgcggacggcggcggcggcggccggcagccgccgccgcccgcggccttgctctgagcagcgttcgccttggttgggtagaacggctcgtcttcttcgtcgtcgtcttcttcctcgtcttcctgtggccctgaaatctgtggctctgggatgttgttgggatcgatggtgaatgtcagggtaggatccgattccatgcatttcagctgacatcaacaggagatagataagattattcagtagtatggattagagtggtgattcagttagttaatcagaagtgatcagaattaataatcttttttcatgaacgcataaatgaattgcacgtcaatagaagaaaaaagagtttttcttatacaatacaatcggccaggtatgcctatgtaggggaaggacaaaaaaaaagcaaaacaaaaacttcagctaggaaactactacgacggctaaacgcaacttcgatggtgtgttgataatcagaaaagtatatggaaattcgagtttcaatgttggagatgctttcatttgatggaagaaatctctttcactagagagtagagaaagatatgagttcgatggtgtgttgaattgattagcactagcttcatggttttgttgagtatgcctgaatgaaaaatggaaaaaagagagaggaaaatctaaatacccctacacccctacaatttaattttgtacaaaattaaatactccctacaagttcatttttctctttcaacctccatcaacactttctccacactccgtgggctttcattgaccattgtggtatgttaagttgttctttgccaccaaaggtgtgtgtccctcggtctccctccaccttccactttttcatgcatgtttaaattaaacagcttgtgtgacgataaaacacgacaaatgacaatcgatcacataatatatgaaaaaggtatattaaatcccattcccaataagagaagacattgagaaacttttttttaaggaagacattgagaaacttcgctcaccatgctcaagattcacaggatgtgagaaatctctaaacatgacgaagaatcaacgtaaactagacagaggtgagaaaacttaaagagaattgtttagaacatcaccaacagattatctataatctccccaaaaaattatttttgggtttcctaaaataaaaataggaagtgaaaaaacttaaaagtggacccttctgaaactacgaacagaaaattctgtttttttccacgtgcagaaagatcgctatctctcacacgctggaacggtaggagagaggcgggagtgtgagattgggagcgactttcacgagaccgcgcgcctgtatataaacggagcgagaaatcgggaaaagggaactccaaaacaaactcgtaggagagtaagagatctgttggagctgttttttgaactaaattcctttaaaatcaattttgggaatcagataggtatagactgttggtgatgctctatatagggagcatactgcgtggaagtaaattgaaaagggagatttgaatttttcccaaaaaaaaaaagagagagctgctaatttcctaattgggctgagtaggcccatgcaagactgaccggcccagcatacggacgttcccatttcttcctcacgtctagatctatctgggccgttggttcccaatccaacggtccagatgaagcgcaaaacccactgatgatacgagacgcgtctcctcggacgaggcccaaaaacggcaaagacggtggcggagacggccggaaaaggaaaggagcgtggccggcggccggcggccggagctctgaccttgcagccgagggagcagaagcggaaggcgacgtcgaggaggccgcggccgcacgcctcgcaggcggcgcacgccacggcggcggcggcggcgcaccggccgttgcgcggcgcctgcgggcgctcgttgaggaagacgaccctgtcgcggttgatgacgtaggtctgcacccgcgtcaggtccagcgtgcgctccagctccgacacgcgcaccacgttgtggtacgacgacctccgcacctggaccacccggtggcggtggccgcgatcccgccccgcgccgccgccgtgcgccgccaccacgcaccactggcaccccacggcggccgcgccgccggcgtcgtcggcggccgcggcgcaggtgaggcagtactggttgcactcgttcctgctcatgccgcggtgcgccgcgcacgcctcgaagaaccgcgcgccgagcagcgaccgcagccacgccggctcccgctccgccaacccagcagccatcgccgcgtccgccgccgccgccgccattaccgacctccaaaacgaaaaaaaatgcagctccaaatcaacaccgcatcgccggagacgaagacgaagacgaagacaagaacaagcaatgccggacaaaccattgctcgatcttgctgccaagcgactacaaacacataccttcggttaccactgcttgctcgtcggagaatcgatcgatcgggagagtgaggatctgtgccagattcgattcaagattgctccatatttttttttcttcttcttgatgagattgggggaggagggggggattgaaagggaaatgaaatgataaacacgggaggacagtggctggcggctgggtttacacacactacggacgcgagcgttttagcataatgcgattgtttctatagacggatggcacgagatgcaggagggaggggtagcctctctctctctctctctctctctctctccgtgtgtttctcgatttttatgtatccatttttgtactggaattcatcaatgtgaccctaatcactaggcaaagagattaagagaggtaccaccagggttaattgtcaaaactagccatggcacaacccacacaaaccacaagggccatcaaaatcaaatcatagatgaaggaaaccactcaccactgaactgaacacatatgtgtaccttgcatcttcctgtgatcacaaagaattaaaattaaaccatacaaaaaaatatgttgaaacttagaagtatagataaacatatacgacacacggaaccaactgcaggatctcttaaatcaccatcctcaacccgataatatggaatcagatgagatgttgccattcggcaaagttttctagggaagacaaaattcaacaaacagacacccctaacctgtaaaaaacatacctcataagcgttgcgccgagtagtaagccaggattatataatgattagaagagacttttcgtcccatggggatcggtccagtaccaccgccgccgccaccaccaccacgggatatctcatgaatctatccgctataacaagacgcgcttagggggattagccctcttctcttgtgcgacacgatgaggagtacaccaaagaagagagaggagccaccatcaaggttggtggcgttggcaacatagtagactagttatgcgttcgagtcttccgtatgcggcaaatgctttagatcacatgcatatatataggcgcacacagaaccgactgatctaagtactgggccagtgtaacctatattgggccgcatataaaagtttacggcgtggatcgatgcgtatcatttaattagatgttggggcgcatccttgtacgtctatttttttaatttttataattttgtcgaatactatattggaaagcaatggtcgaaaaccatcatagaggacaaatatggttgcccttttgtggagagaacaccatgttatatagttcttttcatgcgtagtcttaccttttggtgatcaattatcaatcatataactctattgaattttggtaaaaaaacaactttatttgaatttcaatcatgttactaaaacaaagaaaaatatagctctatgcttaaaaaaatatcaatgcaatagaccaatagtacaggctacagggcatttgtgtcattttgcaagaaggcatattaattaaattaaatcaaacactatataaatgcactattttattcctcaacagtttgatgttagccataaattcttgagcctgtatcttcatatagccatacgtttcattcattactgagtagatatattcatccacccctttgaaaacccaagcaaaaaccgtgtttcatcgcaaaaaaccaaaacaaaattactccagtaggagcaaaaaagaaaaaacaaaattactccagcaggaagcatgaggtttgccgttttgtccctttctgttactttttttatttttttagaagggtacaactcagaacgcatacacacgctagaaatgagattgcactcataccacgacacacgcacacacgcacgctaggaatgagattgcactcataccacgacacacgcacacacgtgtccctaacacacgctaggaatgagattgggcctcagtatatgggaaacgtgcagtccacgacacatgcacacacttgtccctaacacacgctcacgctaggaatgagattgggcctctgggcctcagtgcacgggaaacgtgcagtccacgacacacgcacatacgtgtccagtcccactaaacgtgcacgcgtgtatacccccggggaaacggagaaaaacccctgtgagacacgtgagttgcgatcccaggatcgaacccgagcgggctgctcgctcacctggcgacgcttgctcggttctctccttttctgttactaggtggaatgaatgatcgctagagtaagagcgcccaaccgttgactcggcccggcccgataaggccttgtgaggccccaatccgaagcggattggattacgtgcggcccacgcgatctctcggcccatcaagcactccacctctcaccaccgcaagtccgtaaccaactggagctcctcctcgtcgtcgtcatcgtcctcctctccggctcgatctcccaccgcggcggcgactccagatcggcggcgaagcccaggatctccggcgagggcaggagaatgtcgagataaaggtggagtagtcgagtatcgcgtaaaagaaagagaaatctctccccgtctcgttgtctcctccgctcctcgcgccgccgccaagacgagtcgcgggggaggggcggcgatcgagcagagcaggggaggggaggggatcctggtgagtatccatccgcatcctctttctgattcatctctctctcccaccccaccgggactacttatgtctggaattttgcttgcgttcgttaaccctagtagcttctcttctagatctggaaggagctcttctcctcctccttaatttgagagccctaaacctctcttaatacaactagtagtaacagtttgggggttcaattcaactcaacccccatgtcccaagttggatccacccctgttgctattagggttacggagttggcaaagataatatggtggcatatgtttgcgctagagtcgaatccctttcgcaatgtgcactagcatcgaactccatgaccaggagcaagaaccaagtcattatcttgaatggggataatatcttacattctgaaaaaaatagtttgtgtgtttgcacactctgataattagatttgcttgaggagcaccttaagtagtagtattccacatagtgctaagtgctgatctatcctattgaattgcctgctatattgttttgagaatgaattatatgtttatgattatgctttagtaaaatttctcacttgagttgcattgttcagggaggagtgaccggagggaatgcaagacccaagaggtatgccacgagatgaattcgcaaccccgaagacgcacaagagaaaggtcgtttcccgccccttgcctcccagccaaataaaagctgaacctgagctgctgcggagggaggttccactcacatccggcaagaccaagaaagcccctaagataaccttcaagaatgaacctcgccattcggctccgcaatctgattggggaacccccgattcggtgccagagttcggtccagctgatgaatacagagcgttacggaagaagtacctgctgctggaggatgagaacggtgagctggacaagcaattgagccaggctgaagaggaagccagcgttctcgaggatgaaaagtttgcgctgctggatcagcttgttgtgttggaaggccttgtggatccttcacagatgcagccaccgagaaggctgtgagattctatgcgtgttcgttgcctgttcatagtccaattaagttacctgttactgcttcctgctagatatgtaaccaattgtaatggaagagcaaagacatattatatcgtttattatggaagtttgaacatttagagcacttgtttggagttctttttgtgcaatatgaaagagtgctatcagtttaactgaaatttaatcgtggcaaaacagaaagttcagcaagcatgaagctttgcgcctttgcctcaagtttgagttatgcttttaagaactacgcaactggtcttggggaaaaaagctgaacaatttgtgtttcatgtgatttaagaaactaaatctgttcatgtgaagatcaactgatcatcacaaacttctgcgtaatgtttgcacaaacacatatactccagcattaacataaaaaaaacaaaactcattcatcacggcgaattgacgggccacaattttaacagtatgatttctcaaaaatctttctacaatagcattgtttcgataaccttttctaaccaaataattaattaacttcataatctacagtatattgaattaatctatgaatttatcggctaattagctgacaagctgaacagggctgagactgaatttcttcatagtgactctgccgtgtgagtgctgacgcaatcaagatccaacaattttaggcccacataaactttccaagcccaactcatgaaaagcccaattctttttcaccttatataaacccgagcagcagcagcatccgcctcagctcaacggtcaaaaatctcttccaatttgaatatctctcctcccaaacggtcggctccggagcggcgcccggacgaacacatggcggcggcgatggcgacgacggcggcggcggcggcggaagaggcggtggtggcgctcgacaaggagactctgatgctgatggggtgcggcgacgccccgccggctgcgccgtgcgcggagtgggagacgttcaaggagaacgtgcggccgctgaagcgcggccgcaacgtgggcctcctcaaccgcgccctcaaggcgcacgccgaccccgcccagcgcgccgccctcctcgccgcccggaggtaccgccgccgctcccgtcacccgcgtctctcggttcttgggtttggtttgctctggatttcttgatttgggggcgggtctctggtaatcttttttttttcgtcctacgtttgattgatctactgattcaggaaaatgatcgaggcaatcgacgaatacagcggcgaggatccgctccaaccatggatagagtaagcaatttcccctttgtttcattgattcgtatactagtagtagtaggttgagccgaaagatttgccatgtcggcgatttctctgcggtttccgcaagcttgctgctcatggcatgcctttgtctgcttaatccacacgcagctgcatcaaatgggttcaggagtcgtttccgacaggcggggattgctccgggttggtggtgatctacgagcagtgcgtgcgtgccttctggcacgacgaccgctacaagaacgatctccgctacctcaaagtgtggctggaatatgtgagtttcatgaattcaggattggttctgaggtggattggttggattggattggattggtttggtttccttttgacatccagtttggcttgatcttaatctgtatgcaggcggggaattgtgctgattccgaggtgatattcaggttcctggaggccaaccagattggtcagagccataccaattactacttgtcctatgcgtcggtaatggagtccaagaacaagctaaagaaagctaatgagatttttaaccttggtattgccaggtgagaattttatgggggattggtagtttagtttcttcagatatgagaaaggttgcggattttcttcagtgctagtctgctagtagattattttttagtgataatagataagttccttctaaatttccatatagcctttgacaaagaattcctgttctagatttgaagtctgttttcttcggatttttagtcaacaaacatatagtcttacatatccccatttactgttttagttctatgaattatagtaactaaaatgcattaaactaatttggagtaagcttatgaaccgttgtagctgaaaacttttaccttctctatttgtttttggagggatatgacttttcttgccactctacctataccttaatacctaaagcatacgatttatgcatttgtttgactgcaaggtgtatagtcttccatattcccactcaccattttagctctatgtattataactaaaatgcattaaactgattgtggagtaagcttatgaactgttctagattaaaacatgtattcctgacttctctattttttgttggagggatatgatataatttctcaattttctgctctacctacaccttaatacctaaagcatactatttatgaattttgtttgatggaatggtgcatattaaaccgtaaaattctttggcttttttttttttggtcaggaaagcaaagcctgtggagaagttggaaactacatacagggcatttcttcagagatcatccaaaaagaaggcacatcctgaggtgtacataggctgatttagtaccctatttttaatctatattccactgcccactgaatgaattctattatctgttgaaacaggatgacacaactactgatgatcatccagtacgcaactttgggactgtcttgaaccgtggtgaaatcagtaagtttgctgtgatggtatgattaacatcaatttcaagtgcctggctgggtgaactaatgttgcattttgatgtggcaggaggccagcatgcagaaaactctcacctggtgaaaactctgcaaaggttattacttgttatacgcatgcaatcagtataaagaaatctagatgaacctggaatttttttactggtgttgatactgttgcaaatttgcagagttgatgtcaataggccacttgcagtttacacagatgagaattcgttacctagtcatggccttgctagaaccaggagcaacaacacggcctggcagacccttggatcacaagcagatcggaacaaagaaaataacatgaggcctgctaaatggacatcacacaaggttttttttttctcccctaagccactagaattcttcaaaaggtccctttttgcgacatgtctcgaggtttatcggttcagtaatgatcaatgaactgatgatagtattgcactgaacaacagattcctcagaaggttggatcgagggcagcagttcagccgactcgtgtaagctccattgaagtcttcgtagatgacgaatgcgccgagtatgctactgtgcccttaagttaacagttttgaatagttctttaaaaagagtaactgtaaaaacgtataatttttatataccttcctttgattatttcagggaaccagttccccaagtgccaaagagtacaaaaccatctattctgaagcttaggcaagcaacaagcagaaacctcaagcagtaagaatagttcagcttatattatgtttccagaggttctgttcctttctcatttttttttaatgtacacttgcttttttttaacagggaaactgaactgcttatggagaatcctctgcggaatttccctctaaccagccttagataatcaatatttatgtggtgtaatgctgtatttcgatcttcttttaccaatttattgtttgagtgtttgtgacattatgctgaaataagctttagcctctaaagcttaggcaggcaaagagcctttttaggctatccatgagtgttgtaatattgcacaataatttgattgataaatcctcgacgagggttgggggtgcttaatttggttggatgctgataaacataagtgatgctaatttttaatggtgctctgtttttttttcttttttgggctgaacaaactgaggctggaattgagtaaaccttccgggaaattatttcctttcaaataaaaatcataatgcattagattctccaaataattcactataaccccatcaggtcacaaacaccaaaacgtgattgaaaactgtcatgcaagtggatccatgacagtgtatacacaagatcaggtgtgacaacttgtttgcagacacagacatggcaaaaaacatgtttgccatggatagatctccaatgctatttttttttctcaggtcttatcaaaggtccccattgccagcataaattacggaactttaaggctgtgttcggaatcggacattcccagcgtgtaagtacggaaaacggagcggaaatgagaagagaagattagatatgaaccaaagcagggaaaaaaaagtgagagtagatgaaatattactccacttgatctaatccagcatagcaaaaatgatcacctcccagaacctcaaaagttgatgaccctattggctaatagcactcacaacttcaagctgcaagctgagagtatagtagtgacaacacactgggtggtaataagtgagagagagagagagagagaaaaaaatgaggttttgattatttgatatcctggcccactgtcacacacttggatggtcccatatgttattgtcacatgtgttaatataatcaaagtgataacggataaagcatcaaatcatcaaagtttacaacaataaatatcatattgcccgtacgttgcaatgggatttgaattaaagaaaattatcgctaacccattattactatcattttatgcatatatttgttaccaacatgtaggccctttagcttcacattatccattttcttctactagtcacaggccccatgcgttgcaaagggatgagatatcaacatggttctattttttcctcttacaataagggtttgtttagtttgttgccaaaattaaccttaccaaaattcacaagatttggcggaaatttgatttgcacctgtaaatcacaaatttctagctaattcacttaattgctaaaataaaccttaccaaacatttgccattgccaagttttagtaagataacaaacttaacattattttaccattgcaaccttaccaaactctaccaaaattgggcaattgtagaacattccactcacaaaaccataccaaaatttggtaaggtaccaaactaaacaacatcttaccaaaatattagccacaaatggtaaggtttgttttggttaggtgcgcatttgcttgtgtggtaattttatcttcttatcgaagagttaattacgtgctgaggaaccctcttgtggctgcagttgaagccaatctacaactctacaaggcgaccatactatactatggatggattccgagagtgaaccagacaaatgaagaacaaccagctgccagtccaaacacacaagattcataagattcatgttatctagacccgctttaatttgctttcgaataattaagaggaaagcgtccgatcaagtacatgggatacgaaaccacttaattaactagcgagttctcaatatatcatattccttacatttatattctttaagtgtgttctttgctgttgcaaaaaaaaaaaattctagttatgaacctgaatattaactcgggtatgtcaaagtttgtagttagagatggagtgaatacataataacaatccattttcctcacatgtatattttattttcataaagaaagctgccctatgtatgtgcttattcgtttgtatgattagaatagcgtaaaaagttttggaaaaaaagcgaaagctggtgttctttacttagtactctctcaatcggagaaaaaaaaatcaaattctagttatgaacctgaatattaactcgggtatgtcaaagtttgtagttagagatggagtcaatacataataacaatccattttcctcacatgtatattttattttcataaagaaagctgccctatgtatgtgcttattcgtttgtatgattagaatagcgtaaaaagttttggaaaaaaagcgaaagctggtgttctttacttagtactctctcaatcggagaaaaaaaatcaaattctagttatgaacctgaatattaactcgggtatgtcaaagtttgtagttagagatggagtcaatacataataacaatccattttcctcacatgtatattttatttttataaagaaagctgccctatgtatgtgcttattcgtttgtatgattagaatagcgtaaaaagttttggaaaaaaaagcgaaagctgatgttctttacttagtactctctcaatcggagaaaaaaaaaatcaaattctagttatgaacctgaatattaactcgggtatgtcaaagtttgtagttagagatggagtgaatacataataacaatccattttcctcacatgtatattttattttcataaagaaagctgccctatgtatgtgcttattcgtttgtatgattagaatagcgtaaaaagttttggaaagaaaaagcgaaagctggtgttctttacttagtactctctcaatcggagaaaaaaaaatcaaattctagttatgaacatgaatattaactcgggtatgtcaatgtttgtagttagagatggagtgaatccataataacaatccattttcctcacatgtatattttattttttaaagaaagcggtcctatgtatatgcttattcgtttgtatgattagaatagcgtaaaaagttgtggggaaaaaaagcgaaaggatgaaaaacaaaaacaattccgttgccgggactcgaacccgggtctctcgggtgagagccgagtatcctaaccagctagactacaacggattttgctcaggcagggcttcattatatgactaattttagttgaccgaaaacacacaaaaatcaggatttgttagtttattgctaagtgtggggtgattgggtatactactacggtaaattccctcgcttttttttctggtaaggaaagcaaacctagggttaaaatgcaaaaaggctattattttttacccactaacattttttttagataatggttttaccgactaacatgtaatcgatatatataaaaaaatagaaatctatatgaacctggaggttcttgactgtggtgatactgatgcaaaaattctagaattgatgttgaaatttatataaacacctgccatatatacccttggaacacaagcatatcggaagaaagttactaagtgaggcctcctaaatggacatcacttgagattttttttttcgttcaaggacttgttaatgattttgaatagttttttttttaaaaaataactttataacgtactccctccgtttcaaattatagtgaaactgtttcaagtttaactaagtttgtagaaaaaaaagagtaacatttttaacccaagagaaatatattatgaaaatatatttaactatagatttaatggaactaatttggtgttatagatattaccatatttatctacaaatttagttaaaattgaagtggtttgactttgaccaaaattaaaattactaatagtttgaaacggagggagcacgactttcaatataccttcctttttcgttaattttagggaaccagctccccaagtgccaaagagttcaaaaccatctatcctaaagcttaggaaagcaacacgcagaaaccccacgcagtaagaatactttaacttattatgttaccacaggttctgtttctttgtcagtttttttttaatcacacttttttttttaacagggaagctgaactgctaatggaaaaatccgctgcacaacttcccttttaagcagcctttgttaagcagtattcatatggtgcaatgctgcatttcttttactgacttgtttgaacgatgcgacattttgccaaaataagctttaaacctctaaagcttagacaagaagcagagccttattaggctttgctttgagagtttgaatgttgtaatcttgtactctggtttgactataactcctcgatgtggattgcggtgaccttcggtattatcaaaaagcaataagaagttcttaatttggttgcatatgctcatgttagtggtgatctgatcatttgctaaattttagtggagctatggtttttttttcttttcctgaatcgacatacaaacaaactaaacttggaattgaataatcctaaaagtattttgtttcaaataaataatcataaatgaaatagattctccaaataattcacactgtttttttttaaatattaatcccatcaggtcacaaacaccaaaacgtgattgaaaactgtcatgcaagtgggcccaagatcacgtattttagttacaaccttgttttgccgacatggcgaaaacatgtttgccatggaactaaaaatgcttaaattttgttcatgtctcatcaaggtccccattgccagcataaagtgcaggacatgacgaaatcacatagcaatagttgccatttttcagattcaatttccagaaggatagtgatgcaacagaggtgtgaggctgagagtgatcagacaaagtctcaacctcacaaaacaaaggcacaaaaatattcagaattcccaactcacaagtacaaggttggtaaacatctgagcaaaatcatattgttgagctcttaatcctcactattgtaatctccattttgtcgaattaacaatgcgcgaaaccattaggggcacgcagatttaacatcgtctgatagacaactccatccacaaaacctgaatgtccaaatcttcagagggcagaagtagccatactatattactagtgaaggacatcaactatatgtctatatattcaactaagaaaaaacattgcaaagggcaggtaaggccatgagaagagagaaaaaaaagagagagaaatccatcctacacagcatgacaactgacaagtggtttctccaggtgataatgtattaaagaagcacaatggctgccagcttgggcccacaccaagtgtgttgtgtacttgtgtactacctctagatcacataattttaatatatttttttcacaaaaaaataacttcagagtgacaggttgcagctttgctgctatataagaggccatccatggccaagcagtagaccacagctagctatcttctgcacattttcagttcagtttcagtttcaggtcagtgaaaactgaaaaagagagtgtagcttcttcttcttcttctccatcatcatcttcttcttcttgcgtaatgacacatcaggtgatcagcatcagctgccggccggcgaccggccgccggggacggcgggtgcggcatgtccggctgggctcggtgctccggctgcgggtgaggctgttcggcgtcgtcgggctgctgctccggtgcctggaggagctcaattgctgcccgaggaggtggtcgccggcgacggcggcggcggcggcgaccaccgtgatgagggcacagcggctgagccaggactgccggcgccggcggctggcggcgccggcggaggccggcggcgagagctctttccaggcggaggccattgccgactgcttggagttcatcaagagatcatacctgcagcctactacagcatcagcttgctagtgaattttcatcgattaattagtggatcaactaatattgacgtgcaatccttttgcgcgttcgcaaaaaattagtggatcaattaagttacgaagttcactcatcctgtgatgtgcagtagcttaaattaatctgtatatctcagttttgctagcttttgttgcgtaatgctttccatcaagaatgtacaaaaatgatgttaattttgatgaataaaattacatagtaatataattatgtttgctggtagtgatggcctactggccatgttggaaagaaagatagatgtcaatttcttgggggtcttgaaaattgcgtgttgatgcatggttaggcggtgattttcaacttaggaattaggtgatgtttttgtcatggattgtgacttcgaaggtatcaaagattagtttgacaaaagagtggttgggcccttgcatggtacaaaacaaaaagtagaggatgatggcttctagtgacatacatgatacatgtttatcagcattgaccattgttgttattatatcatgggtgattcttgattggctatgaggaacccactccttatttttgtggtgatgggcggtacatatactacatccctcaaactagggatgtcaacgagccgagcttaggcaaaccccaattatttaggctcgaacttggcacaagtttgagcatttcaacctcgaaactcaattgggatggatttgagctcagctcagctaaagcttgatcaggctcgagctcagattgtacgtcaccgtgtatctaggaccataatttctgaggttatataaaatttactttaagaagttgtaattttattggcattaacaaataatgagggataagaagaatatttgatacacctcatattgttttatcatttggatacctgctagtctactggatttttcataatttggtccttctaaaaaacttatttcataaatagacctttaaaaaaacttattctagaaatggtcctttttgagcaccagagtcattggcaccgtggtctaacggggaaggaaagaaaaaaaaagttgcacatctctcttctacagtagagaggaaaggaaaaaaaaggggggtgggggtggggggtgggggggcagagacattggcgcgcttcccctgccacgtcagcgccgactagggatggcaattttgcccatgggttcgggtatctgtggatacccgacccaatgggtacgggcgtcgattttttatctatgggcacgcccacccgagacccgaagatatcgtgggtaacggctgggtttcattttttacgtgtgggtaacccacgcccgacctgatacatatgtattagctaattttgacttatctcttaattcttatacccctttctcttggttcatttgtgatactaactaataataagttgtaatgtaattcaaattattgttgataactgataatttggtaaattgttaattttatttctctttgttaaattatatatctttagagttattatttacgtgagattcattgggtacccgccggacatacccgtgcccatcaagcatgggtatgggcacagagttttgcccgctaaccctagtgggtaggatttggacgggcaagacgggcatggggtcaagcatggttttgctctacccgtgcctgacctgacccgttgccatccctagcgccgaccctccatagtggcatggggacgacggcagagatgattacgctgtgccattggaccacggcgccaatgactcagcgccctaaaaatgaccgtttctgggataagtttttctagcagtctatttgcgaaataagtttctcaagaggaccgaattatgaaaaatccagtgctagtctactaggatatcagtagaaatttgcatacatatgcaagcttacgaattagtatttgagatttagctcgcaaagttcatgagtctgagcaatttccgtgtataaccctaaatttttttgtattttggaacgaatgtagtagaaaatagttcaactaccactaggggtagggatgatcatgcttcaatggggcctataaatgataagtaacttagtaatgctaggcaatacgttatccttgtctaaactaaaaataatatgttatcctttcctgacaaagggaaataaaccaacagattatttccacactggtctgtaaaacaaagagttatctgttaccaatcaactttcatttattgatccatttccactaagaatgacaaatacatgttgcctgcaattcgagtatataaatttaaagcggaaaaaaagaacaacttgatggacgactttaaagtctcttttctgaagaaaatactatacaaaagacaagtaatacaaaggacaaaatgctacatgccaaaatttttgtcattcgtgagcaaaccatttctttgtaaaacctcagcagacctggaagtcagaaagacttgttctaacttccaatattcagttgcctctgaagtctgaacccccatcgaattgaaatgtatgttagaaaaagaatgtcaaatgagcctcaaaagaccatctccaggcacctgggtcgatgttaaatgatgctgcaacaaatggtgtacgattaatcccacattttagttgaaagtttcaacatattaagttgtgaagaaccagaaaaaagatttcaccttcaaacagaattctgaaggcgcaggttccaactgccagtcatttacagcagtgccaagctggtacctttttcttatcttatattctcatgtaaccactatcaataagctataccttatgaaattggaatggaaaaattgtacaaccgctgaacaaatgatatatatactatgttgatattatagggcctatcgatgactggaatatatcatacagtgcaagctgaacttctccagagctatgctcacagcgaatgaggttagttaataaggggaaaaacaggggcaggtttctcctaaagcagtccctctctaggccacccaataactgcatcacatgaaggaccaatgaagttctagcagacagttcctccttcttagcagtgcccaaaggcagtttccagcgtaatgctggatctctaccagatgaatcgttagatcgttcacgccctgcacatttgagatacttccgtagtattttctcagaaacaagcataatatgtgactcaattttcatatcttctgagattgatgggtggtcatgaaccaaagcttgcagaagtttgagatagctctggtaagactcattctcgaaatgaatgactgctggctcagacacctccaaaagggaacatgctttatggaatttcatgagcaaggtagattcggagctcacttcacttgcatgtgacgcaatggctgatagtgtctctaaaattattcccatatgctcagcataaaaagaccacctgtgtgtctcatacaatttaactatgccctgaaaagaaaccagtggtgagtttgatcttagaacaattgttggcatgtagaacatgtgggaagactattttttatttgttatattactgttttagttggatggccaaaggaaagtatagtattaaattaaatatagggcatgttacataagggaattattgacagaagtaacaaaaactgtaagtacctgaacaactaagagctgctgcgccatatgattcttcaatttaataatagcgtatgatgttgtttccatattagcttcctcttcatcatcattgtatatgtcattatctgaatatcgttcaacttcaggataagattcatttctatctggaatttctatatcttgcatcatcctaactatcttgtcaaacacgacaaatgtttgcattgctgagtctttaaaacataacaagatctctttccattcctccttggagagtctgctttcaagtccttctgttaaacgctgaaaaacagataaacctgtgctagcagactgtttataaggacttctgataaagtttgtgacaacagaagtaactctagaaagttctgtccgcatctcatcaaaaaaggtaatgtacaaatccactaaacacttgactgctactgttttagtttcagaattccaagagtcatcctcagttagattaatgtgcccatttggtgtagagctaccagtgctaaatagaggataaacaacagattcaaagatatttctccaaaaggactgcgagaagaggtgcccatgatccttcaaaatgtcaaagagtacctctactgcaccttttctgattgttggtcttgtgtcagttgtcaacctagctagacctgaaggcataaagcaataactatgttacaagcgcaaagcacttcaaaatcgactaacgcagaaagaccaatctagttttgtgacagaaaaaataactcaccggcaagcagaggaacccagaaataaacatgatcgtccttgtgcagagtggcattcccatcagaaacatctaagttatttgactggtgatctgtatccttttcatgacaaacaaatccttcctcggcaagtttaacagcacagaaccgaagaaatgcaatagcattgagactggcatcactgctaaatttactgctcgtgaatgtaataagacatttaacacaatcagtaaatgttgtggtttcagtctcagttatgtatggaaaatagtcccgaacaatcttttccatggtttcaaatgccaacagcacaatactttttcgatcatcagcagcagcagcagtaaaaacctgtattaagataaaatattataaattgagtggcaatgcagggatgttcctctagttatttcttcagaaccactccctccggattgataatacttgtcgttttggacaagtgcacggtctccaaaaagtaactttggcaactattttctattataatatatataggaatatcaacaaatatatgattttactgaagtactttttaagactaatctacacatatggtttccatatttttaagataaatattttagaaattatttatagtcaaagattttaaagtttgactttgccctattcaaaacgactaatattatcaacccggagagagtagttcccaattgtgcccagggaattatgaaaaattaaaattaaccatagaacaccatacataccgtaaaaacacttttccatccggattttatattgttaacacgactcaaaaccatttgggagatgcaacgaacgacaagttcccgtacttccgaagcattgctcttctgcataacaactgcaaaaggtcgcaggaattcattctgaaaattgtaatttgccagttcctctctttccagaaacttcatcgctagttgcctcaaagagtccataacaaatattgcaactgagagattttctgacgatcccacagacacaaagaagtctgataaaactttccaaatatgagaccacaccagacgtatgcggttcatattgtaatgcctgcacaaacaaaactttgagttagatccaggtataaattaatatagtagctgcttgctatgacatttgctagaactatgttcttggactagattttgctaaagacttacgcaatctccacaatctttgttaggcagaagatgcgaggttctgtaggtgagtgcaactctgtcatcgaaactttacaaagagctttcacaaaagcaacaatggcatcactatttaatctctggctatgagcaaatatatgatttaattcaaaaatgccaatctggtctaacaaatttatgtttgatatgaagctatttatctgttcaggagtaaccaatggtgaggcattatttttagctgttgtgctgtcgtaagaaccccctctgacggcagccattacagctggattctgaagagcattagttcgcttcgaagctgtagtgctacttgacttctgtgttttatcttctgactcaaccagaggcactgtcaaaaatgaagcatcagtaggtgccccctctccaaggagatgtagatgctcaaaccgtgaaagacatgttagtacatgctcccaggaatcctgcaaatagtcaccatcttcaattgcgatggatattatagcctgtaaaaagacattaagaaaacacacatcattacttgttctaatattgacgaataggactatgtctaacaaatatagatatatatattagtcgatatggttttgacaaaaaatagaatcaagtattttaatccagtacaagtgtaaatgctttgaatagttcaagctctaatgtactgtgaagccatctaagtgtcctcaccataaatagaccaagggaccatataagcttgggaattttgtctacataatatcaataggaaaatgcaatagtatgtgtgcatttgcatttaaatcatgagaatcattttttatttcaagaaaacaaaagagaaccaagtttggcttttctaagttcctaccttcacagcatccacattcttttgtttcatgtccgcagcacaatggaggtaagtgaatttggcaacagatgtcacaaaggcatctcgctgtgtctgcatacacattacagcggttacatgcactgcagatctgaatccttgcaaacactgtgatgtggcagccttatcatcactttggtcaagtgtcacactgaatgcagccatcataggggcccaacaaacctccatcatgaatcttaaaatggtagaatcagtaataacatgaaatatagatctgcgaatacaagagctttaattattataaagtgttagctgacgcaagttatttgtctatgagtaactctctcttactctgatttcccactctttgctttgaatttctcctgtatgttcttaatgagtaagtcgtttgctccaagtgccttgtcttcagcctgtttccagttgacaaggttgataatgttatccaagcctaagagcttaattacactactaggctgcttgctttgtggaactgacgaatcagcactcatttttatctcatttttgacaatttgatcatacaatgtactcagataatgttcaggcaaatccttcccatcatcaattcctcggttattgcgaatgaaatcagacttcgacatctgcgtaacgaaaatccatttaatgatcaaaacttctgttattgacatataacagaggggatcagtgatatagctaaccttatctttgaccatcgtattatgagcatcggtattgagcataattacagaataagcaagaacatatgcagtatctgcactggtaaaagaatttggattgcatttgcagtatcgttcagcaaacttttccatgattcgatcaattttttgcgcttctccaggcaacctgaaacctcgcaagtaatacctaatggcttcaccaaagtccataccttcgaagttcagtgcatctgcatatgcatgcattactttgatagggaattcatctctttcacccaaatagtccccgatcattgttgcgtttaaaccagcagtatctctcaagaaagaagcaacatcttctggggaatgacctattttcttgcttttaatgagaaaatcaatacccttggaaggcttcctgttaaacaaggaaattcctttctgcagaaggaattttgcagttcagtaaaccaaatgttaaccctttataaaatgtctaacattggagttaatttaaatagaaagcatgcaaatattaacatacctgaagttctattttataagtacgacgctgctcaagtgaggaagcgtcagataggtctgggttaccagagtctgtttgcagttcataatcaacagcacccccatcttctccaacaaggatgttaggaatgtctatcgaatttaaagatatttcagaaggtttgggtgaaaattcaccaattttcagctgttggtccatccatgaacccattgattttattatggttgcaagacacttgactgactcaatccgaaatgtctggtcttgtgcaggggttaatgttgttgcagatccaggaggaacccctagagcagtctttaaaagcccattgacaatcctgcaaagatctgttggaattaaagggttgttttaactatgatgaagagagagtgaacttaatttttgcagaactgtaatcagttcaatgcatcgattctcatgcagcacttacaggccactaaatagatgcatacctgctgctaataatctgtgacaacaaaacttaaggttgccattcatcaagaacaaaactacatacctttcaaagatatttggtgcatcaacatcacaatcatagttcacaaagacatcaataataacctgggagtctttacagatcttctccaaaaggtttagtacagtcattttctgcagaaagctaggttgatggacattctcaagaaccctcagaacaagcatgggaaaaaatattccaatttcctctttcagcccagatctaaatcttgacagcaaacccaaaaatatggagcataacagttggtaaatactcattgctgacaaggcactgttcttcaacaaggacaaacaaagatactgcttgattgctccaaggtacctgcattgaaaaaaaaaagagaaaagaacacttcagtataagagttttattacccattggagtcagagtaaacagaatgctctttatggaataccctaaacataaaaggttttaaattgtaaccgtatacttgcaggaagcttggtgaacaataatcatatttttcagcatagcaaattagatggatgagcatattttgaaggaaaaaaagaacggaataaagttcagtcactcctaatgttataaataaaatatcgtgatgcttgtgccctctcctggccatcatgttacatctggagctcataaatcaacacttcatgtttttattccctttccagtgtattgttagctcattaattattttctttttttagttagtgaagagacttaaacaaattaagagaacaacatacaaatgcagattatcatcaggacatcatttgaaacattttaaaagaaccaatggcaattcaaatacagaatagtaggtcacgtaaacatgtatctaccaccatagattaaactctgcacttttttccctagaaaaattttcatccatcataatacattaaaaaaatatagccaaaatgttgacacatccaagcagataatagtaaagcgtgcctggattgtgaaaataatgtattagtatcagaaaaatgtgtatccataatttctgagttactactaggcaaacatgaagcctccatatcaattactatactgaacattttatgccttccttcccttagtcatttaagccatctgcattcttctaaatcactgcaacaacaatatttatatagataggcaacacagcaagttgagctgttaaaatgcacagaagtaagacaataatgagtatcatatcatacttttcattcgttctccagaatgccccagcattgtcgataaccatcttgagcaactcaagagacaacaccttcccgcgcagcaggacctgatcttcgggattatccggcgtcgagaacttcatggacagcttgcacaggttcttgaacagtgtcaacccatcctccctgatcttgctcatgacaacatcctccttcccatccgtctcggccggctcaaccggggaccccggctcagggacatcgcttccctccatcgtctcgtttatgaagctctgcgccgcatggacaatgctggagtcattcaggttgcggtcagacatgtccatcatgtcggtgatcgacaccgtgcgcacgcgcacatccatggagtccacctccacgcgcgcgaacacgatcaccagcacctgcgccagcgccagcttagcgcagagctggttggcgccgctgctgctactgaggtatatgttgtagcaggtcttgagcatctggccgagcccttccccgcggatggcgacggaggggcaccgcgcggcggccacgaggacgcggagggtggagagctccatggcgtcgtcggcgagcgcgccgcaggagagcacggcggcgagcagcttggaggacggggagtcgtcgtcgccgccgccaccgccgagatcaccgacgaggaggcggtggtagagcaacttggcgacgcagtcgagcgccgggtcggcgaccttgggggacgccgactcgagcgcgaggaggagcgcgtggatgcacgcgtccgcggcggccgccggcaacccgagcagcagcgacggcggcgacggcgccgacgccgacgcgtacgccgacgaggagagcaggtcgagcgccgccttggcggccgccacgaggcccgagtgcttccgccacgccgcgttcttgatgatccggtccagcgcagggcccagcacccgccccgacggcgacgcgccgccgattgcccccgccggcgaggccatagttagccgtccacgcagactctcacgcgctctacgcggtggtcgtcgccgtcgccgtcgcggccattggatctgagacctcgagacgaggaggaggtggaagaaaatgggaattcgagaggaagacgagacgagcgcgtgggggaggaagaggaagaggagaagtcagaggaagggtatgactgaaatttcagattcttccaggggcctagatgcaaaaacgccgcgacccttcgcgcgggggtgaggcattttatcactttacccccctcggtttctcggaattctttcttctcgtctccatcgctgcaggaggaggaggcggcggaggacggcgagcggtcagtggcggagaggggagtgttcggggacgcggggtttgcgaggtggggggagctcttgcgcctcggatcggctcacttcccgacgcctcagcccccgccgcgccgcggattattgctgttaggttaaaggtgggggtgaatttttgttgctgcgaggtagctgttcgacgaaattccgcagcgtggtttcagggtttgtctctcttgcagggattgtggtagcgagaagcggtggggttgatggagtgcgtggtgcaggggatcatcgagacccaggttattgttcttctttctcacttcgccagtagacttgtatgagtggtgactgtgtgagcggttgttgaagtgaacggtagtttcttccgagaatgagtgatctgtagctatgcaacgatgcatttttgttcatatgaaactgatttgtctgtttatgctgtaaaacatgaccaatttgaacttttacccggaaaatcatacatggcccgtaacataagccggagtgatggtagatgtgatgttcttcatggattcttgatttttgtatgatggtaggcctttctgggaaatcggtactagtcaagtttgctgatctgacatttgcgctccttacttgtatgttgtatctagaattctgaattttatttaatttttggcataaggttatttggcctttcgctttgtagtaaccttatccaaaggagttggaatgtagaatttcgacgtttactaaatgaactttctatcacttgatttaagatagcatttttgttgttggaggtgtcaattgcctgaaaacagacctctgtaaatgtaattgtgataaaaccttttgaaaggtaacacttaagctatcccaggtagcaaatctatcaactgcatagccccaatgtcaaattacatctcaatagtcctacttaggaacaaagttattttttcactccatatagcatgaagtagtattggaactttatgtccatagagaatttcttttttcttgaacgaaacacatcagggaatagagaataataattcatgccagcattaagactttgtcgtcgatccattgtctctatatgaccttttgttagtctcttatagcttcctcttgtcagcatatcaacacttcccttcaggataataaaaaaaaagtatacagttgatcatgctgaccactatatggtcaaccatgtttctccactctgagggcactacttctgccacttgcagactttttttgattctcttttcaatatgttgatatggttctattttatatacaattggaggaatcatatcacttatatggtttgtaattttacaataaagggattaatttatatacacatgtcaatgtcttgtgcttagaacaccatttaaccttttttagttttcattgctttgacatcagtgtaacttttggttgatcttcttgttatgcagcatgttgatgctcttgaggttcttctccagggcctctctggtgtcccaaaagaacgtgtcagagtgcatgagctctgtcttaaaagtgggccaaatctaggtcagtttgcaactttttcattattctgatcatatgccattgttactcatatacatcttccaatcatacaggagttgtcccatcagaggttcgtttattgtgtgacttagctcagtccacgccatcctggtaacttttctttcagctgctaaaatttacatttttgtgatatttgatgatattctgaatccagtagtattcatgtaggaccataagacatgttggaggtgccatgagaggtgctggtgcagagcaaatctcagtccttgtgcggtcaattgtagagagcaaagccagcaacaatgtattgcgttacttctacggtatagggtacaagttagatcatgaagttctgaagggaggatttgcatttcgtttccaccgaggtgcccagataactgtgaccgttacctctgttagcaagatgacaaaactccatgctaccaacgaagctgtgccaatcactcctgcaatacagctagtggaaatcacggcccctgctgctgctgacaattacaacgatgtcgtttcagccgtcacttcgttctgtgaatatctagcaccgtaagtaactaagtgttccttagctatctcaagattattactagactggcataaacgaattttctcacttttgactgcaaaacacactgcaggcttctgcatctctctaaaccaggcaattcgactggaatcgtcccgactgcaggcgctgctgccgcctcactcatgtcaagtggtggtggtggtggtggtaaaacgttgtgatcggtcatatgtgttggctgcaatgccatgatgatctccattgaccatcccacttaaaacattgttgccatctttagttctgtaacttttagtcagtagcaccatggtttttcttgtaatgacatgctaaatgctgcctaccttgctttggagactggtaaatgaacactgatcattgcttgcttttactgaagagtggaaactgaatgctgggaaagcttgacgatattggtggtagactgatagctggagtttgtcatgatcctgacaatatatttgatggtagctttgtttactttaatttaggtcacatacgtggtaaggatctcatggtttgggacgttcaattgcccagtagtttttctctagttaattagtgtgcatcaaactattttctctagttattatgtaagtctagcagtcaagttaccagaaatcagaatacactgcatgcattacttgcatagtcaacaaagtatctcaatgacaactgatcttcctaaaagttgctgcaaaacgaaacaaagccggagtaactagagaggaggggagagagctaggttgctgacaacttgacgagatcaactcatcctgatgctcagtgcaggatgaagtgccatctcctcctgctcttccagctccagctcctttacagtttacatgcatcttcttcctcagatttctttgggatccctattcctcatttgcctggtgatttatgatatggaaagcatcgagtgtacatagctggacctacactgtgaatgataataccaacattctgtttagctagaatttcagttaataatcatggagtctcaactctcaatcttttggaagaaagttgagcatcatataaaaaatataatctcgagagatgaatctcatgtgagttaaccgatctgaacaacaaatataatctaactcctaatgtatttgctcatcatacagcattggaaattcagatgttgaaaatatgttttttatatggatcaatatacttcaaaaggctttcactgaaactgcagcttcggattgtatggtaaaaatttaattgatgctttggttggggtgcgccaggcccgggcagcagtgcaacgcctgggcgacgcgcgagggccccagtggcaagccactgtgataggccctcccccacaaaaaataaatttaatatcgaagtgggcacatggcccacatatcagatattaaactgataagaacagatactacacttgatcttagccaaaaggccgagaaaggtatgagttgcattgttacccaggccctcctcttatacccgctcctcctccttccctcccctcagaatccgcgaggtggtactaaaccgaagagacgaagctgttcttgctctctgctccgtggcatgttgggccgaagccttctgggtgggccaatgtattagatgggcctctactctcagcatcggccttgttggagcacgagacgcggccgcctcgaacccagatcgcggcgccgtcgttgccggcgacggcggactccatgccggcggtcacggctttgctttagttttcataagggtcagaaaataaaagccggagcttctcgtgagcctgacgtgacaactgacaacgttgggatctcgtagtttttctttactttttcttacgtctcatatatatatgtggttacttgttagcatctcgtggattagggaattcagtttgttcaattggagtgtgcatgaaaagacatatcaactatacttacagaatttgatctaatgaagtgcatatcagttatgacagtttataagccaggcaattatcatctccatgtcagaaatcagaatgcaatgcaatgcatagccgacaaaagtatataccatgttcttttctccaacaaaaatatatactggtggctatgcttttcaaattgctaaacgggatatttgtgcgaaaactttatatgtgaaagttgttctaaaatatcatattaatccatttttcaagtttgtaataattaaaactcaattaatcacacgttattactacctcattttacgtgaaacaattaatatttatctttatctttatctttagcagattttctgcaaaaggaaacgaacaaaccaattcaaaaaatttctgatatctcaattgaattatctgatgacatatcaaataattgtaaaccactttatctgtttcatacaacctaagtcaatcaatccattgacctaatttattagtgaacctaaaaataaaatatctaaaaaaagggcattgtaactataactatagtataatcgaaatgtaattacattgtaactaaactacgatatatcagttaccaattataaaatttgaagacaattccgtactcaccgattgtttcgtccatcctctccatggccgattcgggaacacgttgtgtgatttggcgtgcacaagaacacacgctatcgttcgttcgatcgttgttgttatcgcaagagaatcagaaagagtgtgtttggttgctcatgtcctcctagcctggcacgcatctctcatacatactgagtttgacttggctgagagaatacatgcagctgtatccataagtacagatccctcatgcaaccgcatcgccctcctctcgcggcctcggcaacggccgctgacgcgagccgacgcaatcttcttctcaaacggagccacagtgcgatcgaggtgccgccgcctacttccatcgacgctgaggtcttgaatttgtatgtgcatgaggagctcgttggagagggttgacggttgttcatgaaaatgctctttgctctttgtattgaatcctctgtgtcttttcacagtcatctggactcagaacaacagccaatttcagcggagcttgtaatgttcgaaacagaagctgcattcatgtaggagtatgatatacgatggtgtttctgaatattcttggtttcataggtagaacttgtgatctggaaaattgtatggtacaaagattatcctcctttttgccttggattgttttctgtttgattaccaattacatgcaggttaaagtatttgcagaactaggtgagagcattaggatgtaatataaaactttatatagggacagcaactcagattctcatagcacccattgtgttaaatatttgccgggttgaaccaacttatcagtcttaacaattgttatatttctgaagctttccgaaccaaatatatcatatagttttgctaaatgaaagatcaggagccgtggagaataaagaggtactgccagttaatctaaaatgctgaaacaatgcactgttctttaatactttctattgtaaatagaatcctgagggctgctcttcttatgctataacaatagagctaaaagaactaaaacaaactcaggtacaaaatgagctagataaataacttggagctttagtttttttattcagttagtcataactgcttattgatgaaaaatgactttgtgaagttgaaaatgagccatgtgatcttatttttcttcctcatacagatcctatttttggtgaggttgagcgttcataatttagtaggctttcccgacgatgacccttttatgaattcgttgtgcaccggtagacaagtctcctttccattggcaaggagtggttcttaggctgacaactccaaattgcaacttagcagcaactggttggctcgtccacaaaaccaccgtttagggtagtcccaacccatagtatccgtaagcagtgtctatggtgccacatcacaatagaaactacactctacaacctatggtttcttaaagtgggccattaataaatacatcatctctcttctctaccaatcatattcattcttcatctattatgaagacactattctctcccaatacaaaacttgatagtgtctagtgcataggttctcatgttgaagctatgtcttgcatgagacccagtttctttctctctttactctctctcttaattaatatagtgccacataagctaaaagtcctacatggcaatgtagttaatgccatagacaccatcctaggtggagggttgggactgcccttaaggcatatacaatagtttttattagcggtctctctttattgtcatgcaaacatatttagtgacgtggaagagagaggaagaaggaaatagaaagatggttgctacgcatgacaacggcatagagtcgactcttagcatttattaggaaatttttcgttgcattgagtctaataaagaaaagataactagtaagaaagtattttggtacattaatgattagagaccgtattatcttaactattgtaacatgatagcatctaattaacgtagagatcataccggtctctacttttgtaggtgcccttagcagttgtgctgaaggaaatcgagaaaattgtttgaagttgtagttcaactcagccttagatgacctgtagattttttttttgggggagggggggaggggtagtggtgaggtggagtccagattctatttgtcaatttaaatttaaatgccttttgtaaattacaaaatcttagctagacaatttggcattcatggacataatgaaagcacacggaggttaattgttttcttttgatatgttatagataacgggagcgtatcctatgcacacaagccctcgcgtgtacacaccgtatacaccaattaaaaattatcaaaaaaaattctaggaaaattcatacatgtactttcaatagtattacatttacgtgcaaagtcgcatcttcaaatttattctacatagagaataacaaaaaagataaaattctgacaaaattgcaaccttaaaacggttagattttttgttttttttgttacggctaaaatataatgaatttgacgttaagattttaaccctaggtgtaatacaattgaaagtatgtgtatgattttttctagattttttggtgatattttttagttggtgtgcacgtgtgtacacgtgaggacctgtgtgtatatgatatgttgccatagataacacatacatatagttatcatttgtcttgcataatcattgctgagttcaatcaaagatttcattttgttcagtttttaaagaaaagtacacatggcaacgcttttatctataattcttttttatcccatggcaaagcacgggcattattgctactctttatctctactattataaaaactaaaatgtttttaccggtattttggtacgtcatccatatatgagtcggtttttacgttcgtttgcttttggaaatagatatccatatttgagtcagttttaagatcgttcacttttgataataccaaaggaatcatataagaaatatgtttaaaaaaactcgcatgttaacttaagacgatcggacacctaactgcagctcatgtttttttaaatatatatatattgagtgaattgcatttaccaaagttacaagttggacaagggttaaacatccatttttttactttgggctagatatctttgcaaaatattccctctatcccaaaatgtttgacgccattgacttttttaaatatgtttgaccgttcgtcttattcaaaaaatttaagtaattattaattattttcctatcatttgatttattgttaaatatacttttatgtatatatatagttttacacattccacaaaagtttttggataagacgaacggttaaacatatttaaaaaaatcaacggcgtcaaatatttagggaaggagggggtattttactttcaacctctagcttctctctcctgcgtctctcctccaagagccactgtgaaccactgagtcagagcaaggcaggtcgagctcaagctttgccatgcccatacatacaaagctcttcttgctgatgcttggaaaaaaagaaagaataaggtctcctcgcaggtttcgatctccatgctccccaatatcaagctttgcctcctccattattcccaactcgagcttcaactctttttctgcctcaaagctcgagctatacctcctctgctgcttgagctcgagctccaacagtccaactccaccacctttaactcgagctccgtcaatcccttatattctccatcgcctcaaactccagccccgtctctttctccatgctcctgacatcaaaccatgagttcaaatttttggtagttcaaagcctatgtgctcaggcttgtcaagtagcggagtgcagttcgaggtggctagagattggggaagaggagcttgtctgtgtgaggacgaaataagctcactggagacatgcacggaataaagcctggaagactgctcaggaagaagatgatgtgttggttactgacatgtggaccaatagcctcaaatgcaaaatttggtaacaaaatctagccctaagtgaaaatatttacctatacccggtccaatatgtaagcaaggtaataaaaattggtccaaagtgtaattctctctatatagtatcccacgttaaatttcatcttaactaaaccatatactcagttaaccatgttaaatttcatcttaataacaataagattaaaataaacttcaccgtattttttctagtaattacaaacattggaattttctagtaattacaaacattggaactgagttttggttggggtgcgccggcccgggcagcagtgcaacacctcggcaacgcgcaagggccctagtggcagaaccactaatgggcctttccccataaaaaaatatttggatacagaagcaggccatgcgaacatggcccacatatccgatattaaactcgatataaagttgagggactcaaagtgaacttattccagtatgttctgaacttattcaagaataagatcagaacatacattaatcttatctcagcccccggtcgtcttcttatacccgctccccgcctcctcccgctcagaatcggcgaggtggtactaaaccgagaccacgaaaccgccctcccgctctctgccgcgttggtcggttgggcccaatcctcttggtgggccgcggcttgataggctccactgcgggtgaagcccaagacgaacacgagacgcggctgtctcgagctctcatggccacgccgtcgatgccagcgccggcggccgaggcggcggcggcggcgactacggcgacggcgaactccatgcctctcgctccgccgcagccgccgtcctcgggggcgccgttctcccagcccccctcgacggcaggcaccgtcaagacggaggcccctccgccgccatccacctcggcttcctcagccgcctccgccgccgcccccgcccctgccgccgccgccgccgccgccgcggccgaggagtcgccctgcaccatcaccatcccgagctattcaggtaaccccctccatcgcccccaccttgttgtgacgaggctgaactgagacctgaaaccctagcttccctcttcgccagcgtggttctcctacgactccatccacgagaccgagcgccgcctcatgccggagttcttcgaaggggaggcggcggcggcgtccgggtccaggggcccggaggcttacaagtactaccgtgacaccctcgtgaggaggttccgggcgcggccggggcggcggctgacgctcaccgaggccaggcgtgggctcgtcggagatgtcggctccgtgcgtcgcgtgttcgacttccttgaggaatgggggctgataaactatggagcttcgccgtcgggagcgaagcaggggagagataagaaagaggaggcagcgttatcgcagtcctctttgccgattggggcaacaatgcccagtaagctttgcaccgggtgccgcaccgtgtgcgggcttgcttatttctcttgtgagaaggtgagtgatttgctcttgttttgatttgcggatgagttatttatgcagtgctgtgtacagttgtattacaagtttgtcaatgtgtatgcatcgtttaccactgtagaattatcttagctgtttttcacgaattatttctgataagctatgacagcgcttggctgttgatacgggaagtggtaaatattttttcgaatggaaaaaaaaaagaggataccaaggcagaacttggtatctaattagtagaaaagaaagaagcagcaaaaaccttggtatctaattagtagaaaagaaagaaacaccaaagttaagcttaagagtatttgaacttgggtggtgggagcatccaagcctcccacctactgcgcagtgttgtaaatattcagatgtttagtttcttatggaatggaacaaagggtctcttcttttgcagttatgagtttacgcatttgtaaacaaatatatttggtgggtgtggagatgttttcggctgcaatgatttggtttagctagttttggcatgtcccgtaggaagggcaggacagatgagcagacaaagttgttgacaaatagtctgatatatactttgttttggtaactattgtgtttagtttcttatgaaattataaattgagagggtaatcaaacatgtgtgctgcaaatttctacacaaattgaggtctttaggtttgtaaaactcatggtttcaattagacagtaagagtgcaaatatttccagattgcacttattcagttcagagcttgcccttcttaccggaacaacagtccatttggctttacctatgttttgttgaaactccatgatgtggtttgggtattgagaaaaggggatatctgcggctctgagcagttgttcttgaaaccaacaatagtcttgttccctgtgaaaggcagttctgggtatccgtgttcttgcaacctttgttattttgtttggtattttcttaggcaccttcctagcaaagtttaccagaggcaataaattccaactatatggattgactgcctaacagagcatgttagataatactagcaaccaacttatctctttgccttctttcttgtggccaaggacaatcaagcacaactttgctgcttgctgcggtgatctagcatgcaagcgccagtctctcacaaaagcgtgcacgacagctcatttgtccattgcttgttaaggaggtggccagtaactcattttgaacaagtatactctttgcagtcgtgttttaccaattaccattaagaaaagtatttgcaaacgattataataacttagtgacacttttaagtctgggaagttcattgctagtcacgcaaactttatacgtcagttgagatactgtcgtcatatatcatcctggtgtattttgaaagtctcattaattccttgtatcttttaattggaaacactactaaactccttaaattctgcttatgaccaggcagatataagcctctgtgctagatgctatgtccgtgccaattaccggccaggtcttacttcggcagacttcaagcgaattgaaattactgaggacgcaaaatcagattggacagataaagaaactcttcaccttcttgaggccgtcctgcattatggggaagactggaaaaaggtttctcatcatgttggtagtcgatcagaaaaggactgcattgctagattcacccgattaccttttggggaacagttcatgggacccaaggaggacaaaattcagtttgggaatgattgtgatctcaatgaagaatctggatcacatatctcaaaacgactacgcctcacgccactggctgatgctagcaatccaatcatggcccaggtctgtatcagtaattatccatttgaagttaattgttgttatatcttgacttcttgattatgcgatacacttgtagcttatacttggaacaaagactgcaacgtgcaagcttgcaaccatagttgccaagaaaactatatttgtaaattctaactgagagacgtgacatctattatctaagaatgtcacttcggctggaacatcacagttaatcctatattcaagtcaatagttgctatgtgcttttcttatgtagcaggtttttgaatatgggtaacaattgatgcggcaaactgactaatagcattgttttcccaggttgcgttcttgtcagccattgttggttcagatgttgctgtagctgcagggcaagcagctatttctgcacagtcccaggttgatataagtgccagcgagactgattcttctatcaacatcagcaaggaagaaggtaccagctctgctctctaatacatgtgcttggcacttacttagactgcttctgtgattccatcacattgattgttgtatacttgtattattggcaaaacatatgctggtgtgcacataactgttcagatatcaatgattagtgagtgttgtaacagcttcagggtgcaaataatgcgcgagagaaaatgatgtgcaaatacctgcaatattttgaaaagatcttttcactaaattagtgtcttgtacagaatcttcttgcacaaatggtctttcagccaatgatttgctcaaagaggcgtctgccaacgcacaagtacaacttgaaaaggaacggaaggctatagagcagtctttatctgacatagtgggtgttcaggtagggcgccacgaaaattcctgagataaccacattgaatttcgaggcttatattgacttcttgatatctcctgtttaaaattattttcagatgaaggaaatccaggataaaatacgtcgtttcgagcagaaggagctgctgatggagaaagagaggaagcaactccactgcttgaaggaattgctcttttctgatcagctagctgttgtgcagcaccaacgcaggcccccggctgtcaccacagagagcaaggacgatgagaaaccgaagcccgttatcagcataagttgattctagccgagcttcgtcaattgacatggcattagtatgatacaatgcaatcctgtgatgtagcccgactttttgacagctttaggtagtagaatattcaaaaactgtgattagctgtagtatgattgtatgaatggtgtttgattaaactctttgcagtccagctaatgaaatggtgtgttcttgttgagttcgaatgacgtactattatacagtatgtgttattatttctagctttgtactagaagcattgaagggtcagcattggatatagtacaaatcaagcctcatgctttactgtagcagcaatacatacaaatcgttgcaatacccttaggtggtgtttggatccagggacttaactttagtctatgtatttagacactaatttagagtattaaatatagactacttacaaaactaattatataaatgaaaactaatttgcgagacaaatttttaaagcctaattaatccataattagagaatgtttactgtagcatcacataggctaatcatggattaattaggctcaatagattcgtctcgcgaattagtctaagattatggatgggttttattaatagtctacatttaatatttataattagtgtttaaacattcgatgtgatggggacttaaaagttttagtcccatctaaacaaggtcttaataaacttgtctgacacaaagcgtaggcaccattaagatttccaaatgctggtaggtggagatgaaccagcaccagcagaagactggtgaaagaaaatgaattgcacttgtaaattcaacaaaaaaaaaatccttgaagagtaggttatatgtaccgtaaccagcaattggtatattaactcgagcaaacttaaaatgctcgaaaaagttgttcagcaacgaacaaaaaaaaagctctaagcaaaataaaactaatcacattgttgcccaatggcagataaactttgagcataccaactgacgacggttacaaaatcctaccagctgagagcatcttcctcttgtttattggcccgggggaaaaaagggtaaaatgcggctaactctttcgagtttatgctcagttattagcatcaaagatgctcaaagagtaaaaaaaaaaaaaaaaaaacgcagccgtgtaggcgtgtgtagcttcaagcagcaaccttcttgcagtggttctccagccactccatggtgacactcttcggtctttcgagcggcaggccaagagcacggtcccaaatgagctgcgacacagataatgtgaaagaattggttgatagaatgaagaaggatcctctgcattgtagtacaaaatgcagagaagatccaaagaaatgaggtagaaagtggaaagtgagagatacctgagatcctattccaatgctccttgaaactccgaaaagaacagtgtaatacctgcgcagttagagaagttttcttaagtactcgttctaaagttagatttgctactctatcataagttcaagattaaattagacatggcattagattgtttaaccaatacagataaacataccgagcttcagataatccaaagtggttcagtagaactccgctgtgagcatcaacattaggccatgggtttttgacctgaaaatgtgaaggatgttcttatttcttagccaatgagatggaagtaaactgaaggagccgtaattaaaggagcaataattattgatcaatctagtagcattaccttgccaagctcagtgaggataggaggcacaacttcatacaacttggagacctgaaagaggataggtcgatataaatcctattgagacagtgggactgaagagagccatgcagctagaatttagactaaccagttggaaaagtggatcctcaggcaagtacttcaaagcaaactccctctgacatgtataccgtggatcggtcttacgtagaactccatgaccaaagccaggaacaacctacgaatgaatgtgtcatggcatactatctgtgaatttttcagttagagttcaacaaaaagagaatgtttattccagatcattagaaatcatttgtttgtataatataagtagctaaagaaaacagatccaatataacataacaaacttagaaccactgcttagcaatgaactctcagaaagttgagttttcatttcagttaaaacatgatgatatgcacttcctcatcaaatagaaatataacacggagataagctacctttccactttttagtgtcttccacacatactctttgagttgatcagttgtaacgtcactaccagtctcacctattacagatttgatccacaacaacacttcctgcattggatgtgaactatggttagttcacacacacacactaaaatatcaatttaaaaatggaaggaacattatgttccttcttccaaagataatctgcgacatattttgagtatgcaatgcagtgaatccttgtttagcaggatgtggcagagaagatccagtacaacaaactgagcatacctgattagccaggccgtgcaacggtccagctaaaccattcagtgcagctgcaaaagaaagataagggtctgacagagcacttccaacctgtaattgaatatcatgagcacggaatgaagaggtcagtgcccatagatgagtcatgagagagagagagagagaggcaattgccagcaaaagaaaataagtcatagatcataagtgataaatcctaaagataacggattgcaaggttttctgcggcaaattaagaggctaccttgtactatcattaccacttctaccttgaagatagagattcagctaactggatcaaggatcacagcgcaaccaattatattacctttcctaatgcattaaaaggccatactgatacaccaggattttcctagacatacaatagctatctagcagaaatagatacatattttcagtcatagctttgatgctattagacaataaaatgtaagactaatgactccatgagtactaagcagatgatccttcaagataacagttaaagtaatgaagaactcagctaaaagcagtttaagttttagttttgttcctagttcatattccttaaaatggctagtttggtttatcagtgcttattaatatatctccgatacatagtaataacagcaaagcaaatcaaaggcttaaagtggcatccagtgcaatagtgcatgccaaaagtgtaacatatgtaaaaaggcacaaggatgatgtagcagccagaaatgatccattggcaggtttacaacaatagtggcaatgctaacaagaaaaaaactgcattgaaaccagaaatacaaaaattaccagatgtccagtatgagcactgacgtttccaccttcatgatcactggaagaacacaggtgaaaggaaaaagaaatcaaaccaagtcttttagaaataaatagaaactaaaacaaggatggaatgaattacgtgtggattgttatatatagtcgcatcaactcaagcattttgggatcatcaaacccaagcatgtgtgaaaaatttgctgcataatccagtgcattatcagctgctatagttttccctcccttgaatatccttcagagaaccagaaaacggcattattgctattgcagttgaaaatttttacagattgcctggtaagtaaagatggtgaatgaattgataaaaagctacctccggtaaacatatgaagccactgctggaaggcgagctatcaaatttaagcaatcttcataggtaggctcccagaacctattaaaatagcaccaggtcagtacatggaaaatccattcaacaactaatgcaattttggaggcagtataaatcccaagcatactttgattttgacattcctttgtcataggctttttgaaactcactctccacctgcaaataagaattaaaatagaaaaggcaaattaattaagtgtggagacctagaaagaattacaaacagcaaaataagagggttttatcaatggattttttttaaatgattgtcttttttacatgcaccatctccaaaataaatataccttcaaataagtggcaacagaatatgtatttatttcagatgagtgatatatgctacaaggtttacctgaagtgccatcactcctgtggtaaactgggtcatcggatgagcagttacaggaagagcatcgattgcctcatacacatgacctgcatccgtatcataagtcaatcgaataagtgccaagtaggtaagtgggtaacatgccgtatgtttacagaagcacaaatttgtaatgcagccctgagacatatttttccaatgattgagtatacaaaaactcaaatcaacttatcacagatgaatacttaaatgagctatatcattatcaaaggcaggattaagaaaactgaagtcaatagagaacatcatggaacagtcccaaaaaaaaaactttctacagttgcctttcaaatttcaactacacttgcccagcaaaaaaaaataataataaatcaaatacacttaagaatataggcttaagttaacaacatttcatattttcaggcaattgaagagtttaaccttaaaagctcagattactatcagaaattcataatgcagtagcttcaatttattttcaaattgactaactaaagaaccatctgggggaacattatacaagaaacttggtgtgtttatggtacttgcagaataaagcttcgtaggaacaaaaactccataatctctgtatgtatccgtgactatattttttatcttctaagaaaagggaaataagataatgacataaaactcatctaggtttttttactaattgagcaaacaataatgcaataaaccagaagagacaattgcagacctggaacactcgaacgactagccaattcctttgatagagcatcaacttgctctttggttggcacctgaaacaaacaaatacctatcagtccacactagcagctaaatgccgacaaaaataagaacaggaaaaccaagtttacaagaaaaacagttaaacaaaagaagccaaacctttccggtcaaaagaagccaaagtagaccctcaggcaaaggctccccatctttaactgctgtcggcagcactttctggcactctggaatcgagagacccctaaaacgaataccctggataggaaagaggtacagacttacatccaacagcaagatatagagtgatgcacgtttaaatttcacaaagtcaaactaagctaaaaatctaacttaaaatctgcagaaaagccgccatcctaaaaaataaatcataaaagcatcaaactcttgtaatgaagcacattcctacataatgactatagaaatctagactatttagtccctgtacctcttttaaatcaatgtgctaaagttgattacagaacttgattcagattgacaaatatgagcaatcattgtgtcattcctactgtgcactgaacggatcatgctcaactgttagtacacttgcttggagatcatgaaaatatggtgattcatcattcatctattttattttccaacttttgcacattccaatttcaagatatacatagacaaaatatccaaatttgcttctatattatgccattatggtatcgtagcattatagtttacaagcatacctcatccgggtcaagcaatgatgtttcccaaagcattccagtcatccctctcatcccaccaaggaccttggataaacaccatttaagattttagaccaatcaataaaggacacccttgagaaacaatccataaataatcaataccaaaagcataccatatcgactgttatatttccaagttggacctttccatgctccgatttaagtttctttaagcggtcctgtaacagaatggtaaagtgagttgagcttttctttcctggtatttgacaggaatttggcactcttggatggttgagacaaagcacagggcatgcaactcatatatggattttaggtaaacagtgaaatggtgaagttattttatatcaaccatgatgacttcctcataatgataggagcatgcaactagctgcaattatggtcttctctgatacagattctgaatattgtgattactgcttggtgcaaaactaaacttgtgaagaaaacaataacctgatatgccaatcttgtaatgcattttcaatagtgcagaaaacacaaagctagtggctgctcaaaatatacacattttgtgatgagcggtttctgaaggtgctgaaacaatggtgtaatgcaatgttcatgcagcatttgcttccatgcgccagcacagcttttacaaaaaagagataatccacaacatttggaagttgcaagcatgccctcacacaatatcgcatgaagcaagaagatgatatcactacaggctaaagcagtaaagcaaaaagggtagataaagaactggatgccatatactttccaactttgtgtgaattattagacgtgctagaaagtaacaaacctgttgttcaggaatcaattcctgcagctgggacttgagatcctgcatataatatttagaaacacaatcaaacatcttttttcagagcacattccccactttcgagcctagccacagatggcacatagtaactggtagtttcaaccacacatttagcacgaacgaacaaaaactaattgacttacaagatcagatgcgctctgcatctgcagccatcgcacaccaccaagcgtggtggcctcctgtgcctgacaacacaaagcaacgaacaatttttcagcgcacataaatgcaaacgcatcgccagaaaataggcatgcaagatgttggatggctcaccacgcgggatcgaagcctcgacaccgcggtcaggcccctgaagaacgccatggccggagcacgcggctacagggcaagctgctgcgcaaacaaacaacgaagtaaacgatttcgtcagaacataatacatcccaaaatcaaccaaaatcccgcaaaaaaataattaaacaccaccacgcgcacgcgcggaggaacagatcgccacatcgattccaaacaattcctcccaaaccgaaaaaaataataattaaaaaaagcaaattaaatctctcgaaactacaacggatccacaattcgtaatcccccgcgtagaaaaccaaaatccaatagaaaaaaaacccaccgaaattccacataaaaaaatccatctacacaaccacccgcccaggaatcctacagcctacggcgaacaggatcgcaaccgggagagatgaaatgcacttacgctttggagaatttcacggaggcgtcgcgaattgaatcgaatcggggagggagagagagagagagcgattgttcaaagcgctcccggagaggaggaagaaggggaaggcgaccgagcgagcgattgttcctcgcctataaataaaaaaaaaatcgcccatttttttcctgcacttttcgcacttagccccctcaaaaattctccgttttacactttggtcaataaagatagtaaaatttggtcaaattgattccaaaaggtttgggttcaaattgcttctagaatgaggtagttgacacctcattgcaaattgcaaacaggaagacaaattagatacgaccatgactaaaataaaatatataaaatatattattatcatcgcgtggttggtgtctcttcggggaggaagaaggcctgtgactgttcagccacgtcattggtcaataattagcttgttaaaaatagttttaattttcagcaggtgcaaaagtagaaacagataaataaattgctgaattttggatggcccaggcaaaaattggaatgcaggcttgctccgcaagaagaacagaacacggatcacgccacgcttaaaaatgcaaacatgaaactacttataaaataaaataaagataagtaaaatccagagtgatttgggctatgaaaagcccatttctgcgcggcccaccaagagacgcgggcccaaccaaacaacgcagcaggagagagggaggagctgatacggtttcgttctcaatgttagtaccacctcgcggattctgagcgaggcggggcggaggagcgtgtataagaggaggcccagagcaggagagcaactcatacctttctcggccttttggctaagatcaagtgtagtatctgttcttatcagtttaatatctgatatgtgggccatgtgcccacttcgatgttaaatttattttttgtgagggagggcccaccacagtggctagccactggggccctcgcgcgtcgcccagtcgttgcactgctgcccgggcctggtgcaccccaaccaaagcatcaattaaatttttaaagggccgtttgttacgcttggcccatcagacttttcgacaggccgattgttatctttcattagacttaaaccctagattttcgatttacgaggttaattgaccatacgtgggatattattttgttgcaaaataaaaaggtgtttaacgtggagtattttttaagttatttgacattttgttgcaaaattattatgcagtatagggcaataagtggaacgttgtcaagaaaaaaacccagaaattgattttcgattgcactgggaagttatcaggctcagttcacttctattgatgattaatactctgtcctaaaaaaaaataattctaacaataaatctgattactgctgtcctacaaagaattcaattctagcaatgaacctggatacataggatacggagggggtaatattctgttccggttttgttagcaatttttttaaactgtaaaaaggtgtgttttataaaaaaaatcttttatataaaaattattttaaaatatcaaataaatttatattgcaatattaaaataactaaaacttaactaatcacatattaatatatgtttttattatttgtgccctaacttcttattattcactcaaataatttcattggaaacgaatgggaccttaaatccgagaaaatgatttttatttcaatttgcaagattggggtgcagttcatttatattctttttccaagaacagtgagttggcgatgctttgatccagccacgaaggcacaaagcccaccacaccactccactccacatcgcgcggcccaacacatcacaccactctcttccaaactccacatctctcacctcctctcgcccacccaatcccttccgccttctacccgccgccgccgccgcgacgagccggaaaccctagccgagctccgaggcggcgtgcgcgagcgcgagcgcgggcgcgggtgtgggggagccgagagatggaagtcggcggccgcaagaggggcaagcccgacggtgcgaacggcgccggcgggaagcgcgcgcgaggtgagtcgcaaccctctcctcccctttcccgtgcccgacctttgctctcgtcttcccgaatcgcatccccctctctcccgccgcggcgagatttggtttcctcgctgcgtagttagatcgaggagcctccccgattcgtgcccttttgctgcttattctgctagggtttgtaggtttggaaagagagagagagagagagagactaagagcggatgtgactctcgtttcgtaaaggcgagctaatgtttttgtagtttttcttccaagattcgccgagttggcatgtgtttttctttttcagattggttggtctgcttaaaccagatctggtggtctcgttgctccgtgttcttcatttcaaggcgtactttgaattaattatgggttttaaaaacttggagggaagctgtgggtagttgataaagagtgtagtagctgcttcaattaatgcggtatttttgcactgtttttgcagtaggaacgtaaaagtagttaaaaggagtattaatgttctcttgtgtaccaaagattagcaaatcaacaactattaacttggaacgcataattaatttgatgcaacagaatcggagtcatttcaaaccggtgtaggaagcaaatcgaagccatgcaccaaatttttcaggttataatccaacttaaaatgaactccacctggtaacatttattatgcatggttatttcattaaaattttgcttctgttttttttcctaaaagaattgtattgttgctaacacatgaatcaagtaaagattgtgatacaggttgtacctaatccaagcttaagaaacactcactggagtaaaattggaatgcgcacagttgcgcgaaatcactttgaacctgtgaaagatgcaacagtataaggaattaaggatatgtaactccttgtcagatgaacaacctgtcagtaatatcatgatgcagcttcatctgctcaaattgagaaaagaagattgaatacatgacttgggaactgcaactgaactcacattttgaaatcctgccacttatgtcctttgtaacatataatatttatcctaacatttgctacatgcagggataaattttactactgtatggtttgaatctatacttccgtaaatagttgctcctgaaattattttctatcaagcttatgatgttatgagtcattaccaaaatttgtgcatatggtctacatctcttattagcacccattgtcaagctcaacatttagaatgtagtttactgccatgttgtttttaaatgtggtggtggttccagaaatctcctccagtccatactgcatcttaacatttgttcttcacttgttaatatcatttccaatcattgtttatgagatgttgacctattaaagttcacatattagaatcttccaagtaaacatcagttgcatttacaatgaaatcttttggtgtagttcttcaattaggacattatttgcagcatctttttgcttgcactcatgatattcttattgtgcagtacctctggttgcccctttggtgagggttgccacttcctccaccacttccctggtggctaccaagctgttgcaaagatgaccaatcttggtggtccagctattgcgccgcctccaggaagaatgccaatgggaaatgctgttcctgatgggccaccaacacccactgttaagactcgcctgtgcaacaagtataacactgcagagggatgcaaatggggggataagtgccactttgcgcacggtgagagggagctcggcaagcctatgttgatggatagctcaatgcctcccccaatgggaccaaggcccactggtcactttgcacctccaccaatgcctagccctgccatgtccactccagcaagctttggcgcttcggccacagccaagatcagtgttgatgcatctcttgcaggtggcataatcgggaggggtggggttaacacaaagcagatatccagagtcacaggggccaagctggccatccgtgatcatgaatcagacaccaacttgaaaaacattgagcttgagggcacatttgatcagatcaagaacgctagtgcaatggtgagggagctgattgtcagcatcggtggcggtgcccctccacaaggcaagaaacctgtgggaggatcccaccgcgggggaggccccggaagcaacttcaagaccaagctgtgcgagaacttcaccaaagggtcgtgcacttttggcgacaggtgccattttgcccatggtgaaaatgagcttcggaaatcagctgctgcttgagatccattgtggtttgtagcgattagtcattgtaactcgaaactttgagggctgatgctgaattttctgaccgtttaggcttatgtgctgtcttgttttacctctggattctttattgcattttatttttgagctatttctcgtacgcctggttatgtgattatgttatcccttttctcctgcgatgttaaagcctactgtggttgatgattactatgcttttcataaaattaatgctactgtgactgtttctctggcaaagtgagcagtctcgttgattgttggaactacccaaacaaggatgatctgctgtctgcgcttcctgttgctaaactgctacctcgtacctcgatgtgttttcactttcatttttctaccccaatgtgtcttcactttcatttttctacctcaatgtgaaactattaccatgttggttagataatctttttagtcgtagctcagaattatgggtcaaggctaacttgcgtacctggcaatcaaagcactccagaaagattgctgtatccactggtgctccttgtaaaacctcggaaggattgcagcagccactggtgctacattcctctaaggagcaaattctagcgatctttcgtcacactacaagagtacaattccaccgatctttggaaaaatcgaagctgcctgatctaaattctaatagagttaaaagaagaacattagttacatctaagctgttacacgagctagcacgagatgagctatgtcgcccgactgttgtacagacactaggcaaaaccacagcgggctattataacttataatagatctctccctctacatacaacacgagagcaggtaggcgcacacgctaaagtgctaaaaactacagcagccgacgagcagggcagggggggtttcgcttcaagattgttggtctctgaagaggcgcctccgcttggaggttggctgcttctcctcgggcgtctccgcgaccaccatctggtcctgctgcatcaccaggccccggttccgggtgagcttcctgataggtgttctttgcgcgcatagctccggtggatcagcctggtcatgatcttcggcgcaggggatgttctcggggttcctgtgtggcatcagttcttccccgtccggaacgacttcttgcataagctggaaatggatgacaaaaaagagggccaattgtagattagttgatgcccagaactgtaaataaaaagagaaaaggcgtgcgaaaaaaattgtcattttatagaggagctggccaaaacaaaaatcaacacaaggatttttcttcctagcttaagctctagcttaggcctaatgtacagcaacaaaatggattggtatcagataaatgaagacaaagggcactcactcctgagaaaaccagtatcccaaaatggggtggtaaaacttaagaataattctatatatcagatcttgaagttgaattttgtacagttctacagttgaagttgattaatcaaagtcaaaaatctgaaggtttatcaacaaaaagaactactaacataccttccagtctttgaaatcaaatctgaaaacaaaatggctgtaggagacttctcctgaggctatcgcactagcagcaggagcatttctaggatctgcataggaccaatagaattatcttagacatgtcactaaagaagcggcatcttgtcatatcatttaaggaaacaaatgagggcagcggaaaagggtcttacagactatatgatgcccgttgtcatctatgtttattgccaccctgccatctttaactaggaaggacagtgcaaaaacgttctcaacagtttgggcaaaagaacgcctgttcaaaacaatgttctccagccttgcccttttattcctcctcaggatatcaaatatgacagacacattcctatcagtgtctgtctttactccctccaaagattcagcaagctgcatacaaggtagcatcatatcaatgtgctattcagagtaagccatggaacagtatacaagcccagtgattgcatccaggtataaacaaaataaattgccgtaaaaaagatcagtctgccagatgcacggacaagaaacttgatagtggacaaggaatataaatgtttctgttccagatgttcctttaaagaaacgttctatggttttgaacatgtaagcaatacaattacaaaatggaatcagtaagatagatatgttaagttccagctaatgacatgaacaatagcaccagacctgttatggcatgaacaatagcaccagacctgttaactacctcagagactaatggagggaaaaaatgaataccatgatgaaagaaatgcacagatggctattatggttttgttggtatctatcataccctttgtaatatagaatagcatatggctagttgcctagttggctacctgttcaggacgagcattttccgttggcctcgcagtccgttttctattggcaaccacagccttccgttgttttacttctgtattcatgggtccaagcctgtaaagattcagatttgagttgtttaagtcatttgccaggcggatagaattatagaaagcaagaaatgatgcgcatatataaagacggaagagagcttcattacatagtgcagcatccaggtgcagccctgaagacatgggacacagaaagcccaacatccccccagcgcaatgaggcagcctcagaatcaaggccccctgattgcccaaatttcttcagcatggctgttacgaaatcagagggagtgattccttcacttgactgagacctaacggatgttaccaaagtgtttgcaatgtccaacagagtttctgcatcagctatttgctccctaggcctctgcactgcattgtagaaggatgccatcattttgtgtacttcatatagcacttatgcttaaatgatccaaaccagtaaaatatatcataagcagctattcgaagtactagtactaattttggaatgcgacagtgagttctgaacttctaatattaacatggcaataaacaccaagttttgccaagaaatgcaatcatgcaggcaaattacaaagcattggtcttgtagaagataggaactgagtaattacatcaacattagcatgggagaacaaccaacgaaactaaatgcaatcatgctgatgctctgatgttcgagtagcaatttgaagtaaaatgtcaacagtagaataaaccagaagtagttcgcaataatgctatatcagttatctgaagaccaaccaatgttttgagatcctgctgagattcactacacatacaatgcagatgaacaacttgctaatatgccttcttcttttttctgaacctgcaacaagtgctccagcagccacttcagcagctagtactaacagcctaagcataaggttcaaatatcacgatgtctttctaatctgtgactcaaatgcaatacaaatcggaaacagcgagtccaaggcaaggataaccacatcaaactgcagaaaaacacacggtttagcaaaggcgaaagggggggaggatttcgtataccgagctcgtgcaggcagtccacctgcgtgatgatggcggcgaacgtgtcggagcccgccctcgccatgtcatccttctcatctgcggcggacaaaacacacagcacaaacagctcaaatcacacacccccgcacacccaaaaccaaaccaaaccccacccccacggcgagccccctaccgctgatgagattcttcacggcgaggtaccgcgaccggagcagccgccgctccgcaaccccctgctgctgctgcctcccgccgccgccgctgctgccctccgccatcggggaccgacctggcgctcccaaaccctaatcccctccccccagatctccgaatccccaacgcgctcgccccggcggcctcgactcgagccccgatcggcgaagcgagcgcgagcgcgagagggaaaattttgggcgaaatttcgtgggggggaagcagccggcggaggaggagaggggaggcgcggatttgaaagcccctgccttcccgaggagaatccttgcggctcgggggagattaatttcgcttttgggtggggccagcttgtcagtggctgtggggaaggtggagtggaggtcggtggctagggattttttttctagagcttcgtggggcccgtatgtcagtgagcgggacgacgggcgtgcgggttgtgtttgagagtactcctacgcgtctggttcagtacttcagtgggctcgtggggtttatttaagtggggtccacatgtcagtgagtatagggctatggaccaactgtttgtgtgtgtgtgttgtggtttgagaattcaggtgtggttttgattcccgctcgctattttgaggtagggcacgaggtctgggaatttgccgaatttgggaggattttgccgggcttcccgattttggttcaaacatttggttggttggttggttggttatcacttatcagttgcgtcagaactcgcggtgattcggtcccattcggatttcggaacataaaaaaacggaattatattccgagatgctttggttcgaaccaaagttttcgttccaaaccatggtgaataaaaagagtcgttattgtccagctatacatcggaatcgagggattgtcattgtatacaagtagtgtttctttggtttctaagaacatgtttgaggcatagtaaaaaaaccggtccgagggtcgatccgctctagccattggttcaccggacgaaccaccgggtcaacggttcgaccgctggttttttatttattaatattacatttaatttgtattatttttaatatataaccatcacaaattggtgaaaatatgcataaataaaccattatatttattattacatggtcataacattaaaaaaaataaatgtgatgtggtaacataataaattcatcctgtcataatgccataggaaaaataaaaaccggttcgatacttaaatacccgccactggttcaaggaaaaactggcatgttcaccggttttttattggttcgattgcaggagcggtcttttagcagaaccgagctgtcaaggtggaggcaatttcaagctgctgcagcttcttctataatcagaagctccccaagcagtctagcttttggtttagattttgaaaagttgtaattgtaaaatttagaaaatgaactataagtcataagttggaaaacccaagttttgtagattctcagaagctaccaactagctgcttcccataattttaagctctccggaccaagccctaaaacgtggttactagccaagcaagaggatgtcaacattggaagatgacagattgcaccatattaatttgctctgtagtttacttgttggcttgtcagtggcattcaaactttaaatcactaaatataattttagagctaattttggcataaggggtacatgtggtgcattatagcatgataaaagactgtcaagagaaggtagaaggttcgtgcggtctcatattttcgcttatgcttatgtttatcagcctaaatttaatttttcaaccttaaatttagatttgattttgggttatttcaacgaagtttatttttcagtctttgcttttatatcgctaagatcacatatatgaaagttttattcgtaaattatttttcgtttacaaatatgtcgtttcgcttattcccaatgaagtcgtgttatgttcttgttcttgtacggagtattaagactttgtgtttgtgctgttgggcttggtttccaatctggataatgaaagttgtctgttatgagagagagagatggagcgcgctcagaaggttagcccttgtagatgggagaaaccgcaggtgggatggatggaattacatttggtcccgttagtttattctataacaagtggatgaaaatttaaatactcgtggcacaattttcaaactgctaaacggtgcgtttcgtacgaaaactttctatataagagttgttctaaaatattagattaatccattttttaagtttgtaataactaaaactcaattaatattatcaccttgttttgcatgaaacaccgccaaattgtttggttgtgctgcaagtgcaactgatgtaaacatcgatgaaaaaacctaaaatgaaattcaaatttaaggttgaaaattttaaatattaacttataaggataagcattaaaaaaaaagatgaggttataatgagcgggttggttgcacgcataacaggtgtttgatgaaatgcctgtgaggtatgaacttgttaaaaaattgagtttctgctgcatctctgtgtccgcatataagatgagatcaaaacaccttaattcacaaaaaggagcatgatgcactacagtatacagtatagcagcagcaagatcatggcatcgccggcggctcgccactggacactgccaccaccagaggcccgtactccatcgcctcgatcgcccccaccctcctggccacctccgccatggtcggcctcctccacggctcgtcggcggtgcagtcgcgggcgacgtcgagcacccgcgccatctgctcccgctccgcgccggacaccggcaggcaagcgtcgaacacctcgccgccacgcccgcgcgccgccatccaccgcacccacccgacgaggctcccgccgccgccgcgctcgtcgtcaccctccgccgtcacctccgccgacgaccacgtcggcggccgccccgtgagcagctccagcatgacgacgccgaagctgtacacgtcgcccttggcggtgcaccgcatcgccagcgcgtactccggcgggatgtagccgagcgtgccggcgaggacggtgctgacgtgggtctcgcacgcgctgatgatccgcgcgaggccgaagtcggacacccgcggctggaggccctcgcctaggaggacgttgctggacttgacgtcgcggtggatgacgtgcggcacgaagccgtggtgcaggaacgcgagcccgcgggcggcgccgccgcagatcgtgagccgctccggccacccgagcgccgcgccgccgccgccgcgcagccggtcctccaggctgccgtgctccatgtactcgtagacgaggaaccgctcgtcgccggcggcgcagtagccgaggagggggacgaggttggggtgcctcaccttgccgacggtctccatctcggcgcggaactcgcgttcgccgccctggaaccggcggccgacgccgtggagcctcttgacggcgaccctccggccgccggggagctccgccctgtacacggtgccgaagccgccgtcgccgacgacgtgcatcccgtcgaaattcccggtggctctcatgatctcgtccacggtgaccctcacaggcgcgtgctcgaacgtcgcgaggttgatgctcggtggctccctcttcttcatcctcctcctccccaaaagattgttactcaaggttgtctcatggtcagccatggcgttgtcaccggcagggacaaggacaaactgcctccttctcaacatcttcctccgtcgtctcagataaaccaccaggatcaccaccagcacaatgacaatggccgttgcaatgcaacaaatggttgcttccagtacatggaacggatgatccggcatctttcgatcgacacggttagcggcgcaaaccccgccttcttcagcagcacaatctgccaaggtgaaagtgccaccgtcgcggttaccggagaagtttgcgaaggtcaggccaaacataccgcagataccacaagggatggtgccactgaaatcattgcttgataggtcaagatagtacaaagaagtgacccttgctattgctgatggcaatcttccagtgaggctgttgttgtggagatcaagataggtcagctttgtgaagttggagatcgattcatccaggctccctgagaaatggttgctgcttgcattgaagaagatcagtgggattggggattctttgtcctcatgacaggaaaatgggatttgtccagagatgttgttgtcactgacatccaggtggtttaggctctctttgcagagtagatccaatggaagagtgccggtaagcgcgttacccgataagtccagcattgtgatctggggaagaatgttgccaatgccagaaggaatggagccactgagtctgttgttagacagaagaaggccttggaggcttgccaatggtacaggccatggaaggacaggtccaaccaatgcattggaagatagatcaatggttgttatgtttctcagctcagcaagttccacaggtatagtgccacttaacaagttgtcttgcaggtgtagctctaccagtatagaacaattgttgattgctctcgggatgtgaccagtcaatctgttccgcgacagatcaatcaatccaatgtgttgcacgtactccaattcagaatgggactcgcgcgagaaagccacgcatagctcagaagggatagcgcctgacagccgattccgggacaggaccaaggtgttgagctttgtcaagtgagatatggccttggggatgtgccctgtcagattgttacagctcaagtccaatgtgacaaggtttctgcagttgaagagctgtattggaatgtcctcagatagcatgttgccactgagagacagtgctgtcagattccttagagcgccgatcgatcgagggagaggtccttgcaagtagtttctgtcgatgctcaacgattgcaagctcaagagcttaccaatgctctctgtgatcatgccagttagctggttatcactgagagagatgtccaagatggttgatgattcccataacctgtcagggatcatccctgtgaaattgttatgtgacaaatcaagtgacaccagtggtagcaaagctaagtattctggtatctctccgtggagatggttatctagcaagcttagctcagtaaggttcttgcatcccttaaatgtctcatcgatactcccggtcagattgttatcattcaatctaagtatctgcagaaaggtgccttgacatatcttggcagggatagatcctgacagccggttggattctgcagagaaactaaccagatgtaatggaagacccggtagaggtccgtcgaacatgttctgcgcaagcgatatagatgaaacattactccagttctgaatccaatcaggaatgtggcctgagagtctgtttccttccacatcaaacaagacaacggcaactaaatctgcaagttcttcaggtatagtgccagtgaagttattgccggacagaactagagtagtaagcttcttgcaattgccgagttctttcggtatgctcccagtgaaccctgcactcttcgccatcagctgcctcagattgcgtagctcaccaacagatgctggaagctcaccactgaagctgttgaatgatatataaagcccttccaagatttcgagattgccgatcgacaaagggacggtgtccatgagattgcatttgaggagattgagtacttcaagctgcttcagattaccaatctcttctgggatgcttccagttaactcattgtctgataggattaaactttgcagatttttcagttgacaaagctccttggggattgcccccaccaaaccatttgacgataaatcgagcttgacaaggttgactaacgctcttattcccgggaatattgatccggtgagattgttattgtttgcatcaaggtacaagagccgagatagattactgaaagatgccggtattgatccactaaatgcatttgtgtgaatgtcgaggtactccaggttcttcagactgcctagctctggagggaggcctccagagaaggaattcgtggatatggatagcacggtgagctgctgaaggtgagcaatggcagggcttagttgtccagagaacatgttgttgtcaagcaccataactttcagcatcttcaagtcaaataatgaggcaggtagagggccaccaagctgattatcactcaaatctaggtgctggagatgctgcagattcaccatggcttctggaagctcaccggaaaacccgcacccgcttacattgagccgaacgagtgactggaatgcaatgatctgtgatggaaaatcgacgtagagtggcgtagatgacaggtctatggccacaacagtaagccccacgcatgatatacctgaccagttgcatggaggagtttctagctcaaaccagttgtggaggaagccttttccaacagcgattgctttcctcagagcaaataaattcttgatatcggattccgccaaagcagtgatagggatgaagcagagaagtagagtgaacaagcaaacgtgatactggaaaaaggaaagggagagttacaatgaaaggcatcgttattcaggtaacaaaatcaataacaataccaacagctgaaggaaagaattataacacttgacttatgttcaaggttctaatttgcaaatgctcagcaattacaggtagactatgatacagtgaatttgagatgcacttgataatgcagcgcaagggatgtgtggttttaaccccaaaatcccgtgttcaatccccaacacgctcacaatttcttatttaattgttggaggaacgcctctccctccaaatctcgttttttatgatacagtgaatttgatgtgtatggtataggcatagctgatactatgaatcttatattttgagatatagtattgttttctactcaaggctatgtatttgggggctgtccagcttatacatatttttagatagaagaatctagcttatgcatatctgctcaacaaatgaagtaaatgtaatagcaaagctaaagaaatgcagtaaatatgtctaataaaaattcaatataaatatgaataaactaatgatattttcacatgcaaactaactagataaacaaaaaaaacatcattgttcaggcagcagagttcttgacagcccagaacatcgacccaatgcaatgaagtgtccaggcaaacagctgaaagaaagaacttaaaccaggtacctgtcgaaccattgctcgttcttcttctcaaaaaccgtggcaccgtgctagttatgcagatcgcccaacttcagtaatctgaaatggtagtctttgagaaataaatcctgcaacaagaaaaaggcagcacctgtcagctactcagttttctggaaccgtcgactacatacaactacaagaaaataagaaatgattagcaaacaagcctaatattttctttgtcaatttgtcaagagtgccaacatttcaaaagcagatggcaacatattcaagaaagaaaggaccaatccacacttcaatcgacatcacacggcacaaactcaaaaccgcaagttaatatattcaagtcccacagaataatcctttgtaaaactagtaaaattatcccaactccagacgaaacaactttcaattgctgaagaactgagacaaatgttaaattaagtctgttttttttttctgctgtaaactgtgacatttcttttaatggaaatggagggttaaggccctttgatcaaaaaaaaagttaaattaattaccaacatgaaactttctactagaacaatagtatttttgcaagtctcttttccctttcctatgtatagcctttctatccaccgggcactggctgaagcatatgtgttcgtatccctgagatttatttatcgccctttggttttacaaattttatcggttcctagaccctcgttggcttataagcagcaaccaaatttaaatcccatgagatatataattaatttaaggttttcgtaattttccatttttaactttagttttgggccgctaagaatctatactccttataaaagagagcaatgttgccacctcaccaagtttttttttatttaccgactaccccatcatgttttcttccaattactctacatgctttaatgttataaaataatccttctacatatgattctatcttatttcatctagaatgaaattgtcccaaaaaccttaatttgttttaatccgtataaaagcatgattatttagctagtagaaatataaggtccatactctatagtctatagttatttatcgccgcttgtacacatgtctttgtcttataagccgctactcgcattaaacgagagatatattaaaaaactactaaccgaaacgtaattacttgtccgatagtagaattgacttgcgcttactaattacgtttcggatagtagtacaactactccaactttaaagtttaataaactccaaaactgcacgcttgtactgctatggtcgtagtagagcaagtataatagtagactataagccggttaaatattgaggtggaggagaaaagagaggagagagaggagaagcgggctataaacttacagccggcttagacacaggaaccaagaaactctacgagagagacatgtgagccctgtattaattgtaaggagctaactattatatgggtaggctgagagaatgctacacagaaccttataaccaacaagtcggctgtattattaggcttgctcgtagtagaagtaaatgtacgtgacccgaggccgcacgaccgaatcgaaaccaatcaaccaaacgagcgggtcggaattcgggggagaaagaaatggatcgtgcttaccaaaaccgcgtcccggtctcgcggcggcgccggcagccggacgtagcagccgccgccgcctaccgcagcagggggatcccgcggcgcctgcgtgggctcgccggagcggacgcgcaggaacaggacgacacagatcgatgcgcgattacgatccgtacctgatttggtttgatccccccacccccaccccacaatgcggttgccggcgaacggagcacgaagaccggtggcgcgggcggaggcgtgaggtgcaatcaacgccggcgagggcgagcgggaggcgatcgagagcatgggagccatggcgatcgacgagaggggaggatttatagtggggagagggagagagagattttgggggaagcttccggggttttgcttttgctgcttgcggttgcagccacgcttgccttcgtctgcactctgcagtggtgtactgcactgctggccgctgcactgtgcggtgccctgtagtagcctctgctattccgtttctctctgtttttttttttactgcagtgaaatgggatgccattttttgctctgctaatgttatctgttttctcttgcccacaaatggttgtattttatttttggtacatcttaacaatagcactaatatgttgctaaatttgcagggcattataactggagggagcttactttccttacttacctccattgggtggagcatgtcgacccgatacaatcataagaataagaggtaattgtgttcttgtccctatttacaactgcaattgtgattttacccttgtatttttaactttgtgattttaccctcactattttgaactgaagctcaggtatgcccctgttccgtcaggaggactttaatggtgttaactgacaggtaaaaggacatctatgcccttgcagatttggcttgtgaggactttgtgttttggctgtgtttcacgattacagtagaaaacggaggtatgaacttgccctgcatgcttaattattttaacaacgaaatccaactttgtaactacacaagaaatgcgattctccagcatatgtttaaaaaaaatcaagggatttattaattaagaaacactatggactgaggtatgaattcaatgcctcaatgcctgacgtatgaacttgccctgcatgtttaatcattttaacagtcaagggatttatgaatatgcaaacaagaaacactactctcatctctttctttcaacaacagaatagctttgttggtcctgtccagtttaggaaccaaccaatagtccaaggcagtaagaaaaataaaaactaaagggggagtgacaaagaagaaaaagtaaaagacaataaaactcaaatgttcctctcctcctctccttgctgttcttctcctccttgtcaccatcatgcctcaggcgagctcctcgcggccatgctaatggtggcaaggcagcctagctagctacgcatatgcaacagtacgtatgtactcgatcatctgctgtgcagcggttcgggtactatagccgaggccgatgccgacgagcccagtgaccaccacggcggacggcgacgggctagctcagcttgacatcgccatttggcgccggcccagcctgcttcaccccgcgctcctccgcgacgaccgcgcgctcctcgctctcgcttgcccgcgtgtgccgccaccgctcgcgagggttaggaatcggggacggaggagtcagcagtggcttaggttgaaaggtttgggatagagatgtctttttacattttgcaagtcaatttcttattttcttaaactcatttaatctgagtccacctaacagacgtttaaaccaggggcaaacagaccattcaacgtcaaaaagtgagggcaaaatcacaaagtttaaaaagtaagggtaaaatcacaattgcaaatgaaagtaggggcaagaatacaattgcccctaagaataaagtagaaaatccagaaatggttttttcactccactgcaaagttctaatattagatgactccacctttaaagaaagcaccggataataatattgtcaaaaagacaatccataccgacacccaattttactaaatacagattatcgttgccacgtgtcgcgtctcgctaatgccgtcactttaacctcataaccattagcttcgataaatatatagccgagtgaaaataagcagacccgtaatcctagaatcaacacctatgcaccctatcgcatctttgctgatgcttttgatatccctagcagcttggataaaaggtgagttaccatgatgatatagattggtaaaggtaaagtatatatagtaaagccacgcactgtagatttattcttggacaaaaccatttggtgttgttagagtaaccacaatatgaggataaaatgggtaataagcaattaatgctagcttcttacctggtaagatacattgtggtagagatggtagttataaccgagtagtatgcttactactagcaataaaccattaaaatatactatttgctcgtgtatgcataacaatcttctcaagtagcattaaatgtgaaccccatcttaattaccacttcagcactaaacattatgaaacctgctaataacaactattgtcggatattgagacccacgttactatcaagttggtaaataaatattgtggttacccttatatctcggacacgcctttctcattaattgtccaataatattcaattagaaaagacaaacacatggcatcattggttttatatttatcctttttctatatgtcgaagcgtataatcatctgttaatagtgcagcatatccacaatgtgtcgcgacataaaaccgccaataaccttccatgccatgacatcaattatctgccctttatttggacacaactagtattcatggctcgaatgtttgacgtacattgataaatatgattttgcaagcaccttaaataaacaaatttcacaagcacatggcaaatgtgaactccaattacattttctttatcctagttataacatatattagactaaacaacaattgataatttgatacaaagtatacatgagacaataggttaacttaggatttattaagtactagctatacaaaactatccccgcaaaaaaaaagctatacaaaactaaaaaaattagattaacatgatctttaaaaacaacttttttataaaaacattttataaaacacacaccgtttaacaatttaaaaaacatgcacacgataaacgagggaggatgatgagttgaaagcttatgggcagaacacagccgaagtttctgtaacagccggaagttcctataacaaacctctcataattcgtttaggaaatttttagattcatttttttttctgatggaagaaatttttagattctaaaagtagctggtggcaattcatcatattgtgagaatctaaacgaggaaaaacaagccttttacttttcgttgattttctagattttgtaacttctgtttttcgaaatctgaacgagaaaccaaattattcagatagagatgtttttgattccggaagaattttgctgctccccaaaatagttcctcgttctctcctccatttcccgccgccgtaacggcctctcacgcgcccctcacgtgaccgccctctcctcctccccaccccatgcttcttccctcccaaagcgagaatcctcccaaacttttgaaaaaccctaaaccctcctcgcgaatccccgtggcttctccggccggccgctcggggagattcgatcctcccccccaaccggtgggttcctccaattcgcgggcggattgctcggcccgatcgggagacggccgggggcgcgcggatctgggggagcggcggcgtcgggagcaagcgcgcgagcgcggggggttttgggaaagttcgagaacgttccggttggcgtcgtcggcgatttcgtgcgcggatcgctcgatttggtctggatttcgtggcgatcggcggcggcgctggattttgggggggagggggcgcgctgagccgcggaggcatcggaatggcggcggcggcgctgcctcgcctcctcctcgccgcggcggtgctgtgcgccgcgttcgcccccgtatcagggttcaccgacccctccgatggtgagtctactcaacccctaatctgtagcgatcgagcagttaccgtttgatgcctctactccgagctcgcgcgcttgcttgcgagggctgggtctgtgctggtttgacggcgcagctagccatcgcgcgcacgccgcacgcgtactcgtgattcggtgattgcgcgagcatgagtttgcccagtgcgtgtgcagtagtttgcacagtctcatgatgaatatctatgcttgctcccatttggtattagtgttcgtgttggttctgatctgatcctgtccacatcgatgtatgtgattgtgtgccacaacaagagtgtgcatgctattgtgaccgtatcgtagttacctttgttcaattcctgcgtgtcatgccgtcttcatgtttgtgtatgacttcgctgccttatgtttaattttctgttgtttctggttgttctacagctttagggctttgggaattatatcgaacattggattctccatggcagctttctgggtggacatctcagggcggtgacccctgtggccgcggtggtgaacaacggccatggcatggagtcctttgcagggattcgtccattgtcgctttgtaattcttcagttattcttaacttcctgatcagtttcacctgcaactttgcagggattattaactgagttgaatattttgctcttctttcactcgtacacagaaatattagtgggctaggagttggcgggtggcttggtctggagctgctcaagttttactctctgaaaatactgtgagcttttgaccagaaagtttgtgataatctgttagcatatcatgattctgctgttcttagtccagtctttaatttctttgcttcgctgaatcatgacgaccgtagggatgtgagcttcaataacattgctggtgaaatcccgcgcaatttgcccccaagtgtggaatacctgtatgttctctttgtatttcggttatcccccttttggctgggttaaatatcaaatatgaactatggttgacataatcgccatatgttgtgctcctgtagaaatttcgcagccaaccagtttgaggggagtataccaccgtcactaccatggttgcacactctgaaatatctgtgagtgcatttttggcaattggagcacttcctaattttctatagtgaactctggttgcagaatcaaataactggcctgtaattaatctttgctgcaggaacctcagccacaataagctctctggaataattggtgatgtttttgtcaacatggaaagcttaggaacaatgtagtgctcccagattctaatttctttatcctcttgaataaatgaattatttcttgcactgtagcctgcaacgacatgcgaattcttgcagcccaaacattatttaatatttgcatgtacaagagaagcttcagccatgcttaactgcatacatttgtgtttcctagatttccccctccattattgtgaataactgcatgttttcttagccaccccacaaaaatgcatgtttcgttgcactcacataaatcacatggatcatttgatacataagtttttacagtctgtttgtttctatttttgcatttatttgctttatggtttcttaaaaaacaatcttcaaggctcaagctcatttgacctgttaatatgggcacacactttgatgctagagtagttcctttggaccttcttgcaattctactataattctccatgcaaatttagctatatatcttcgagtaattcgatctttcacccactgtagtctgtacctcatttttgttcgtattcaacttcagggatttatcattcaactctttcagtggtgacttgccaacgtcgtttagctcattgaagaaccttcatcacctgtaagaatgatgtgcgttcttaacgatttcatgcacaaaaatatgctagaatataaaaggttcattttgttttggttttacagttatttacagcataatgagttcacaggatctgttattttgttggcagaccttccattatcatccctgtaagaaattcaactgtattttatccttctctatatttgtttattctcatccttcctgacaattatcaactggttgcagcaacattgaaaacaatagcttcagtggttatgtgccaggaacttttgagtccattcctgagttgaggtattcggttctgcttaataacccacgtttctttccgtaggatatttatgcatacatgttgccttgacttcatatctagttgaaataagtggctaatctaacattccaggattgatgggaaccagtttcaaccaggtttcaaacgtgcatctccctcatttaccaggagtgctcattcaccaccaactccacatccacctccatcttcacctccaccacctatgtccccacctccaccagcagttaaggaaaatttgaaacacaagcccgaacctttgaagccttccttaagccattcttctatgtacaaccataatcagcacaggaagtcacactctcgagtgacagctgctgcaatagctactgttactggtacagcttttgtgctcctcattgttggcttggttctgaaaagctgcacatacagtcctaagagcaccgctaacaatgccaaatctccacctgccaatgtggaaaaaggtagcactggaactttattagtttaagcataaccggcttatgcaattgtagttgatggctagacatattctatatattcttgttcatcacttaatattcatccttatgttaggatctgtatgtaatatccaatcatgtatatatatacttgttctccattcctgcatgttgcattattggatagacttacattctttcatatcactgaaattcatacatatcattttacagtccctaaagcaaatgaggtcttgtactcttggaattctcttatgaatgactgtgaggcttcctctagtgacgtcattaagcctgaaagagctatgaaaacaaaagtttgggccaagacatccaaaaactttctaactgcaaaacagtttcaagctgttgacatcttagcagctaccaggaacttcagtaaagaatgctttattggtgaaggtttcactggccaagtttacagaggtgattttcctggtggccaggtatcatattgttagtaccctgttggaaaatactattggtttgttactttagaacaagctctcgaatctaatttctactacgtgtttcagtgtcctaatactgaattttcctttagttggtgtattaagtttatttactactactttttgttcatcaactggccgttttccttttcttatcggcaataaaacttgtcttgcatcgttgacattttttttctcttgatctctcgataagctttaaaattcaatgcacgaggaggatgcaattcctagtctcattgcaacttcccgaaatcaatattagaaaaaaatatgtgatttatcaaatttatcatttgctaaatagtaaaggcgcatattttttctacagattattttacatctgtgttttatatgtataacatgtatttatcctcgtacatgcagctcctggctatcaagaagatcaacatggtagatctgtcattatcggaacaagatgagctcatagacatgcttgggaaaatgtccaatttgaagcaccccaatatctctgcgcttgtgggctactgtgtcgagtttgggcactgtgcacttctatatgaatatgcagaaaatggctctcttgatgatattttgttttcagcagccacaaggtccagggctttgtcatggaaagctcggatgaagattgctcttggagttgcctatgctttggagtaagtacatttttgtggacttagattcctaccaaatcatctagctgtttgttttgtactgcagggtatacacatcctcatagtgttaatggctttctgtaaattgttctgctgaactgatgtcaatttttagacatatactggaagctttcctgaaattttgaagcttatgcagattcatgcattcgacgtgctctcctccagttgttcatggaaatattaaagcgacaaatattttgctcgatgctcagctcatgccctacctcagccactgtggattagccaggctaagccaatttgtcagtgccataagaacggtcagtgctcactagttttccatgttatattggatagtgttcttacttctgtacataatcattagtgatggtgatatagttaatgttttacttgaacaattctaggatctaattgttgtcatggattgccaatctcttggagttcttactgcatacttaacgataaggaattttaagtttagacagagaaggatgcattgagaaaaaacgatccataaagttagctttttagggaaaagggtttgtcctgttgatggtgaggctgtttaacctccccatctgcttgggttcaagtcctaagaccaaggcaccgggctggtgcttatgtcctttggtgaacgctatagctcttgaactattttccaaaaggaagaaagactaaattaataataagccagtttagacccatacttttggaattttgtcacgattgcttacagttgcatctcaaccaaaatcaaaggtaggtcgctggatagactcctatacattatagtgttatatcaaaacaagctactctcccttgaaatatttgaaagatgtatatgtgtgtgtccctactaggatcaaccgtggtcccttcagaagtgggtagaaaaatcacacacatattaaggggatactggtgtttttcaaagtcaatgatatatcttctgtataatccgttgaccgttaacagttcctcacctgaaaaaacaggactcagaagctctcaacagtggtaaaggctatgttgcacctgagcttactgacccagcaacagatagcatcaaggctgacatttacagtttcggtgtgattttgctcgtgcttttgactgggcagaaggcctttgacaggtatatgctcacttaatcttgtacagctgtagtctggttctctaatgaagttctttttcctcttcagttcaagaaggcagaatgagcagtttctagttgattgggcatctcctcatctccataaccttgattctttggaaagaataactgatccaagaatacatgcatctatgccacctcaagctatctctacgttaggcaacatcatcttactctgcatcaaggtaactgtccgttacctttttctggtacacattacttagttgaactatgctaccttgaggatagaagccaagctgcaaattgaaacaccgcatgcactactccttaatgcttagactctgctcctaaatgggaattgaaggggattatagctgaaaaatgtctaattactgcggtcctaatgatttatgaattcatcgaatgaatttcagcaccctatatttgtgatcattactggctgtatttcttccttcaatgcagaaatcaccagagctccgtccgccaatgacagtcataacagacaaactactgaagcttgtccagtcgacaggtcttcaaaagaccagcacgacgacacaacacttggaggttgatgctcaggaaccctctttcaaaacaaccagaccgtatttcgagccatcctttacaggtacctcactcgataacacacacttccatttttgttcttatattcttcatttcgaagccttattttcattgctctaatttagtaagtcaaagtgcaaccggaggctgcatctcccagagataaagcccttccctccacccccccaatttctgtactcgaggagcggtactcaagtatttcaagcgccgcatcactttctgcacaccctgtcagtttcaaacggagaaacccaaagctgctgtgctaagtggactgcacaagacttgaaatttttcatggttgatcacttgacctcagagaaccgagcgaagtggactcttttacatccaagtcacgcgtggctagatgtattaggaaccgtttaactccacaagtttggactcaaatgagccggcgtgagcatggagatgctgctcggaatgctctttctagtgaactctaacaggcaggtccagccttatcttcccctgactaatcactttgtgcctttgtggtcggctccaatacccttatctttcctaaccgtcttgcattctaaaaagatacgcatcctggcagtgtctcagcttagctgtatagttcgttgtctggaaccccgggggtaacgatgttcgttagccagtgaccaatgaactataaacacgatgccatgctggtcctgatcaactcacaatgctgctcgattcagtcacatgcatgacatgcctgttctgctgtgagtaatttttcttggatgatatgtgctgaatccagcagatcccatccgtccgcatgacatactgccaatttctagaaaactcagcgaactgagctttagttcaataacctctttactaatttgtggcattctagtaactcaaacacactagcaaatgcctctcccgtggcaggcaggcatacacgggagctattagtgttggtacatgatcttagtgtacaaatcttaaccatctccaatcttgtcccaaatgcagctagctatcttagctagcgaaactcagatggagatgctgtttgggatgcccctcccggtgaccccgggcgtggagaacggcttgagcagctcgtacggcacgatgccggcgccgcacctgttcctgagctccgggtcgttgttccgctcgtcgacgatgccctcgatctccttcatcctccctgcgaacctctcgaacgccgccttgaccctcggctccgccagccacgccggctcggcgtgctcccccatgtactcctcgtcgggggagtgcgacgacaggatgtccagcgtcgccatgatcgtgatggcctgcatcttggacggcatggtgtccagcagcacgtgctccggcatctccatgaacttcttcatctcctcctccttgttctcctccaccggcattttcttcctcatcaccgtcggccggttcgggaagtagccgccgtagtggtactgcccgaagttgacggcggcgtggtggccggaggtcacccacatgatggtggtcaagacgccgatgagcccgtcccgggtgtccaccgccggccaccacggctcgtccttcttgtcggcgtgccccttggtgcgcacctcctcccaccacgcccgcacctcctcgtcgcaggcgacctcctcgtcggacttgtagtagaagtcgatgtaatccgacgcccactgcttgatggagttccagaccagcagcccgtcgttggcgtacgggtagtccttgatggtgagctcgagctcgccgtcctcctgtcgaacggcgagcccgcggcgcaccaggtcctcgggcagggcctcggcgtcgaagcgccacgtggcggcgtaggcgacggagctgagctccatggcgtacctcccgggccagaaggactcctcgatgatgccgtcggcattgatgaggctctccctggccagggcattgatctccatggtgtagcggaagtgtgggtggaggaggcggtgcaccgggtgcatccggctgagctgccggttggcggcgatgatgtacggctcgacgcagcagtgggtgcggagccagtggctgacgagctggtggtagccggtgtcgtgggagaggacgtgcgccttggcgagcttccacagccacgacgccgtggcgtcgggcccgtggacgaaggcgcgcctccactgcggcctcgttggcgactgcggccgcgccagctcgatggcgagcggcgacagcgtgccggcgccggtgaggaagaacaccgtgcgggagccgtagagcgtcgtctccggccgctcgcggacgcggtgcacgtaggggaggaacacgtcgtggtagtccaggatgaagagccgccgctgcgccatcgcctcctccaccgtcaccgactccacgatctggctctccagcaactccttcgtcagcgccgactccggtggcccgtacacctccgggtccagcttgctcacgatgggaaactcctgcacacgtcgatcgatcgccattaattaattggtgagttcggttttccttagttgctactcacaccatttgagacttttttcctcaaaacttttaaaaacagacattcgttcaatgttaagcaaaatagaaaaaaagggataccactagatttgtcatcaataatactttacgactcgtatgtttgtctatttgcacaaatatttctacaaatgaaaaatagtcatacaaactagaaaagccaataatggcgccatttatttaaagccatttaaaactttttagctaaatattgagagggaaattatctagcgaaagggctaatgtttgcgcactgcgagcggccacactttattttctgctaagtttaattatataactaaagtttatacacctaaaatttttaccacaaaagtttatgtccgattttaatttggattcgaattcaaatgtttttttaatatataaaatgagtatgtattaaaagtttctacatataaattttaaaacctatgcattgcatgggctatttttatgattatataaatactaaatttttaccatatggttaatatatggctatttttcaattaaaatattttttgtatcatttacagcttgttagttatatatacatttttaaattctaaactacatcaacataatactaagttgagagtttaagatgggtataacttcatgccataaattgaggaagaagggaatatgatgctaacaaatgacaaatagtcctagaaattagaaaaagcaatagtgtcatttatttaaagccattaaaaccttttagctaaatattgagagggaaattatctagcgaaaagggctaatgtttgcacactgtgaacggccacactttcttttttgtcacgcgatttttatttttttgttaagtttatataactaaagtttatacccctaaaatttttacaccaaaagtttatgccagattttaatttagattcgaattcaattgtttttaatataaaatagtatgtattataaaagtttctgcatataaattttaggaaacctgtgcatttaattcatgggctacttttatgattatataaacattaaaattttaccgtatggttaatatatgattatttttaattaaaagaattgtttgtatcatttacaacttgttagttatatatatatttttaaatttcaaaaccacatcagcaaaaaactcagttgagagtttaagatgggtataacttcatgccataaattgaggaagggagtatgatgctaacatataggatgcatattttctttttattattgaatcctttttctgctaaagacactaacatgtttttaaatactggagtacgtgatttttaatatacccattatggatcttgggttcgattcctagtctcagccacccagcttttacccaaatattgtactgtttcatttttttgtcatataaagtctctaacatgttttttaaatactacataatttttaatacccattgtaaaaaattttccatctgccactgtaccccttgtttatttttctactgctatatatcttttctctcctaaagacatcaacatatgtatattttttgaaatatttattagtataaaaattctgggttcgccactacacattaaaggatgaccaggacgggacgagcgaaaattcattctttttgggggatgacgtcatcgaaaagtgacgtcgtcctcaggtgaatagtgtatgtggttgggaatggcggtgctaccgttaggagctggatgcagatggggttgacgccagccagcacctgcctcgcgaactcctcgtctctgaaccacgagaacctatctcctgcgcaatgcaaagccaaatccaattgatccattgcttaatcaacatgttactacctcgatagcttaatcaacatgttactacctcgatatttatattttaatatatgtcgtcgttaagtttttttcaatatttaaccagttgtcttattaaaaaaattatataattatcatttattttattgtgacttaattaatcatcaaatattctttaagcatgacataaattttttcatatttataaaaaagtttgaataaaacgaatgtttaaatattagttaaaaagtcagcgacggttatacattaaaatacattcggagggagtactaattagtactaccgattagcctttaatcatggcacgtaattaattaattatcacgtacgctcgaacatctcggggacgtcgaagcggaggacgtggtcggtggtgtcctcgatcatgcggacgaggcgggggatgacgccgccgacgatgttggtggaggtggaggaggaggccgcggcgccgccggccgtggcagtggcggcgccggcggcggcgagctgcgccggcagcgggatgccgacgctgtagaggccgtcgatggccgggaagtgcgggaacctcagctcctggttcgccagcagcggctccagcgccggcagcatcgcgtgcagccccgacctcagcgtcgtcgcgctgaacgtcatccccttcacgtccgagaactgctcgtcccgaggcacgtacaccggccccctcctcttctccgtccgcggatctaattaattacatatacatttaatccattagcagtggctgagccagaaattttttgagcatgattatggagataaacataggctcaggtctaagctgtcctaggtttgtcttcgatcattattactcccttcgttttaagttataaggcgttttgattttggtcaaagtcaaactgttttaactttgaccaaatttgtagagaaaagtagtaatatttttaacctaagacaaatttattatgaaaatatatttaattattgatttgatgaaactaatttaatattataaatattattatatttgtctataaacttagtcaaacttaaaatagtttgactttgacaaaagttaaaatgttttataacctgaaacggagggaataggtgattaatttgatgtgaaaatgatgtaaaatttctgggaggtgaggtggggttaccgatctcggtgtgggggcggccggtgcggcagcggcgagggtaggggtgttcgtcgccgccgaggacggggcggaggtgctcgatcttgaagtcggggtcgccgaggtcgttgtagacgtcgtagtcgtagacgcggtcgaagaacttgcgctcgccggtgccgtcgccgcgcagcgtctccagctccttcttcctcagcgcctcgatccccttgggcgtctgcgccggcaggtacgactgcatcgatccatggccgcgctagacgtcgttgatatgatgcttccaagtgttcatggatggtgtgatggtgagatcgatcgatgtttgtagtaccttgacggtgaagaagatgcggcggtcggggttgtcgaacttggagtggacccaggagttgcagtcgaaggtgacggcggaggagtcgtcggcgccggtgacgaggcagatctccttgacgaacatctcgcggtggtgctcgttctccaccagcacggcgcccaccggcccgaacgtcgccggcacggcgaactccgcctcgtacgtgtcctgcttcatcgtcctgtgcgcgaacgcgctcaccgtctccttctccttccccgtccctgcatgcatagacatggtgttaattactactacatgtgtttgtccatgcatccatggagcttcggctaagccatggatatgttgtgctgctcacttgggtcgagctcggagctgacgagctcgaggaggagcgtcttgccgatgaggtcggtgaggtcgtcgatgccgcgggcggcgtagacgacgccgatgggcggctgcacggtcaccgtggcggtcaccgtcagcgtcctgtccaccgtcacggccgacgacacgccggcggcctgctcgatggtgctgcacctcggcgccgcgagcctaccggcgcccctcctcccgggcccggcggctcgccgctgctgcagctggctgctacagcacgccgccgcgggggaggaggccggcgacgccgcgaggagcggcgagccgacgacgacggtgctcgcgttcttcgccgcggacagcgccagcggctggttggggtgaatcatggtggcgagcgattgatcgggcggcggcgctcttgctcgacagcgcgtcgcccgccggccggacgctcgttgaacgatatgattcgttctgatctccggcgtctgtggtgtggcgccctagttaatatatagctaggctaggctagcttgattgatcgagggattgggacacgtgcgtgtattgccaatcactcatctctctctctttccctccctgtgcacttgctgttacatctcctatatgttctcctgtgccatagagcagctaagctagagctagcagtggcctctcacaagattatttgctacagctatttcacactgtaggaagacaagcaagtgtgtgctcatccccgatttagcacatatatacggtttttcctccttcatgacatttccgaatagccataaaactaattaaaaatcgaacaagatgtatcaattcttggtatatcactccaaacttccatatttagagcactgactacgtacactacatccaagttcaaatttgatctttgttatttgtttttaacttgtataggtcgattttaaacttctatgtttatgtagtggtacataatctattggtctatcttatcaaatttcttcacacgtaaaaataagaggacatgacatccctttccttgctatcatattttgttaggcgttatgaattatggtatatggaaaactaaatggttgaattggaagtgggttacatttttccactgtgccgagagtaaatgacattccctagatctttagcccatttgcattagagaatctccaagtgctacatattgattacgctaccgtgctatcatccgcaaaaaataacacttcatggtttgtacaatattttgagtcgattttctttgcctgggcagtattaattatcgtaccaatacatatatcggatatgtcctacgtatggaaaaaaaaacgactctttgtatattttcacgaacgcgtaaaaagattacacgttgatatattagaaaaaaaatatttcaattacaaaacgcaactgcctggacaagggagagaaaaaaaaaatcaaaaaccgaaatatctactataggtactacgcaagcaaagttaaaacgtactccatccggaaaaaaaaaacttctcaggatgaatttgaaaaaaaaaataattctttcatgaaagaatggtgtaaagtgtagtcagaagacgtacttcacgcaaggtaaaacgtcgttccatacatacgatattaccatgaacgtacttctcgcgacccaccttttcgtccacaggagtcaggatgattccacatatatatacgtagctatcgtgatgaacaggacacaagctagggaacataaaattccaacaatatacaaaaaaaagtactcccttccttaaacaatattgctaatattgcgtcgacgttgatcactaatttcttttaaaatggttgaaataagaaaaaactaatgcgtatgaagcaaaaaaaaaacttttgtaatacgtaatcttttttagtatttataaatttttgcattaaaaacaagattaaattaatttcaactttgtatatcacaaaactatatatttaaaaatttgtatcacaaaaattatggatttaacataattttcatttacaaaataatagatttgtattagaaaatcacatagatttaacatcagttttatcacaaactaaacttctgctatggatataaactataaaatgtatagttcttaatatcctcataatctgtagatgccttaaatatgcagatatgtgataaatttgacactaaatatgtagttttggttaaaaaaaacgcatatttgttttgtgatagtttggtcaaatcatcgttttataaagtttactctaaaaacaaacattagaaattaaaagtcagaatacccgatatttttttgtaaattcgtgcctatatatcgttcacacaaatatgcatatatggattagaccggcctgctctccccgttacacgtctctatctcaataaacggctggatatatatagatgtaaaattaccagtggagtatgaattgaagcagggtcattgccagagagaccgagacttgccacactactacagtcacagatcgacaagcgtgtgaatcggcacgtacaagtgtatggcaaaatggccaatgccaaatctgaaggtgacaagactgtacatatccttctctatcagactagctatcactgtacatgtgtctacgtctaagctaccattttaccatgcgttaaaaaaattactctacttggcaaaatcgacaatgaaggtgacttgactgtacatccttctctatcagactagccatgtcactgtatgtgggtataccgtttaccacatgcgtgttaataatataattacttggcaatcgatcgagagtgaataattaatatatatgacgaaggtgacatgactatgtatccttaattccctatcacaaattaaactagctatatcacgttaataatttactccaagattctttttttttaaaaaaattcacgtacttatattcgtaggtgtatatcacatcctatagattgcgtcacagatatttgtatatgtatgaataatacttatcttcaattaatctttgtgtaataataatgtacgttgttccgcggttataaatggaacatgttaatattttcatttatgtgaaaaaatagggctcataaatctccgtttaagattcatagtatataacactattttccgccactataattaactactccctccattccaaattgatgtacatatttcatagatacactaaaaccaaaaaaactaataactctctcatactatatttactttagcaacaaactcgatgcatgcaccatccccactatttcctagccaatagcaaatcaagatattgcatgtgggttataaatatttgtgtgcatggatgcatgcattaatgtctatttactccaatgcacaaataacaaatagacttaatgaatgaacataaatatgtatatcatttagtaataatcttaaaaaaactatatgtagatcaatttagaatggagggtgtattaaatagctaacactggacacatcatatcatacactttgttccctttcctccccgcatctccctatcttatcactttagcgcgaggaaatgatggaaataacagtgcgaaacgtggatacagtttcctatatatattagccaccatgatgcatggcatataatagcatgatggttagtaaagtggtaaaaaaacaccactaaaaccactcttagcgctgcatcttgggttttaaaattttaaagtgaaagataactggttgaaaaataaaatcgaatcgtcttctctccttgtcttccatttaaattccatgacttgtcgtactttgatatgatcttttttggctttacttattgaaagatcgccgggaaaaacctgtccgggtacgtgccgtccgtactcggctcactcgtgctcctccgccgcctcaacttgcacggcaacctgcgcgacgagctccgcctctgtctcagccgcccgccgccctccgtcaccggcagcgccgcctgctcccgccctcgcgtggccgccgccgtgctggtgagaagagagagagggggggggggtgggttgagaactgataggtggggcccattgattttttttaagaaaaattgctgactggcctgtcacgtagacccaaaaccactccggattgagtcgggggggttatttgtccggtttcaatagttgagggtgtagaatgtctgattttcgagtttgggggtgtaattcggtcgacctcgatagttcggggggtaattcgtactttttttctaagataaatgattgaacatatgtcaaaaatcaacggcatcatatattaaaaatgcaaataagtagcgtttctgtaatagtacagaaagaacggattaaattttattaaccacaggacccaacaaatacttttttttggagagattggctatcaccgaagaataaaactctcctgcttttcctgtgctgggttaattaaattttatttaccacaggacgtcccacataccttttggttttcacgtgcactggtgatgtttctagctgtcttgcatgagctcaagcatctcatcagcaggtacagtaaatcaggacaaaactgtacttagccggcgtttagctaactactaacagtgtttaattaaagtacatgcatcatgaatggtgatgcctcaagttcgattgagttggattattgttactgctcactaatagtagtctgaattagtacggctgcccgatttctataatctactgaccggtcagtcagtctaagctgtaatcacatcaaatgcaataaatgaggacaaaattgttacccggagtttagctagctacgtacacgttacagggacccttaaacagcaacaggttatatgctaccttgcacaccggacaaatcaggaaaggaagctttggttgtatgtgtctgtgagtgtttccatcaaaatttggaaaaaaaaaagcatttgcaggtccaatttatctcatcaagttaaaatttaacatacgtgtaataccgctaacatcgtcatattgcaaccttgtgttaaaagctataattaatcgagaaaggaaaaccatagagattggagtgctggtgtgcaaggatatgtaagtttttcctttttcttcaaaaagagagagaataaagataaaattatgcgaactacggtagctcaactctagaattaagaaaattctagttctgcgaaggatgaagagagaaggcaatggaaagaagaggtccgatatagcataacacaagcgacaaggcaaagaggtattttagaagaatcattttttcttcatacagagccaccaacaacggtgcctcactacgtgtatgtctttgtaattcattcggtttttttaaaaaatgagtaaacatgttcaaattaataaataagcgcggtggtaaattgaatagatataaaataattcagatttcacattaataaactagtatgatttggatatcatgtatactagtagcaaactgtaggcttatatacaagtgtgcaaccaatgaacggctttgcggttcacagcatgcagtcctagcttgcaggataatacaacatctaatatatagcatgtgctgccaaacatgtggctgcgaattaataataagccgtatacaaaaatattcctctcaaataacatcagagagatctcaaatgaggaaaagatgtgaagtatacatgttgtactgtcatgctcccgtacgtattggcctcctcgcactttcttgaagtgactatagtactgttgttgatatgtccatatatgctttcacttttgaggtcgacaatgaatcggcctgtttgaaatgtgaaaaaagattttcattcatatatatatatatatatactatgagttaaactttttctcatatagctcctaccaatatataagacattattaactgtttacacggtttacaatgcaacattatactttgacaatattttttctaaatatatttttttaaaaagaaaattaacgtcatataggtacttctaaatacaaatctagttataacatatgactttaattattagacaaatgttataaataataatttttctaaaagatagtaatgtcttatattttgagatggaaaagagggacattcttgtaaaaaaaattgcattccatgtccgagactactagagattgggtgttgtttatcattcaatattctttagtggcttgaccttgtagccttggaagtaaccagactaagcgtaatttatcatccaatattctctagtcaagttttttttttcaacgataggcctgcaagcttatttcacctttgtagtataatttaaagcgatttgtattctaaaattttatttttagatataatttcaggggagtttttttaaaaaaaatttatcttctcaacaatcatgaaaagagagccaagcaatggaaatgacgaagaaattaaaaaaaaccctcgaataaagttctaaattaaatattcaagaagccacagtacgttttgattattggctaggcctaatcatgctgaagccgttgcagccgttcgtgtgagggcacatgtatctctgaaaatgctgtgcatggattcttccatcaaccgggagatgcctatacaaaaatttcgctgtcatcacagcgactcttgacagatcatacatactgttgcaaacttttctatagattttgcgtgctgttctgttgtcttctaatatgtgctagtgatactgactaatatatatgtgcctcaccgattaaaaataaataaataaaacaattaacaaaaataacttatcagtaaaaattatatgtattcttgatgatttaaaagacaacgctaaaatatacttatatgatgaaaaacttaaaatcgtctctaaaattaaagagtaaattttataaaacaacagatactttaatcaaattatcacaaaactacagatttaacactaaatttttcacagtactcgtaaaactacatatttagtaataaagttatcataaaactacaggtttagtgacaatttaattacaaaacttacatgtttataactcaaacataacactagtgctaaggatctaaactctgaaacctgtagttttgtgataactttcttattaaatctgtagttttgcaatactccatattagatttgtagttttatgataaatttaattttaaatctgtaattttatgatatataaccttaaatatatagttttgtgataatttgatcaaaatatatgtagttttatgaaatttactcaaaattaattttttagttgtagctgatgtgcttgcaaagcatcagtatgttgctagccaataatacagcagcaatcaggcaggagtagtgtacaaccttaattaagctatatatgtatggcttacatcctagctaccttctcctactagagcctcatatagtcatgtggaacatatagaaagaatttgtgtggtgaagtgctatacatcgatcccattctagaggatatggattgtgaccacctatatactaatgaagtacttcttgtatgtgttttttttaaaaaaaatgcattgcttgtatatatgtgtacgtagacatgcaatagaccaatttacaacgacagctgttgaagtagtagaggggccgattggactaccttgtaatcctgatgatctctctctccttttcttttactgaaaatcctgatgatatattccctcttgtggctgcatccgaagatgctcatctagggctgcataataagccagctcaggttcgtttgaactcgttatctttacaagtcacaagtcagttcactcagctcgctaaccttaacaagttaaaagtctagctcaactcagctcgcgagctaaattgttaaactcgttaacacatttatatatcacttttataatttcaaacttaccaatttatcacgtattaatatatatagtctaaaagctgactaagaaaaggctcaacaaatacaaaagtttgaatgtaaattaaagactacgtactaattaagaagcatggaatatataaagatatatattgttatctcttttactaacaagcaactcgtgagctagctcattataactcacgagctaaaagtctagctcagcttaactcgttacgaaacgagttcaagccgatcaaagccacgagcttaatttgagcttttgtccacccatatgtccatatgcccatcgatgatatataagctgtcccgtgatgggtcaatgccattaatttttaagaagggtgtggctagtcaccagcatttgtggaatcatgaagggatcagagcatccgcagcgtataatttgattaagcaggcagccaattaattttcttggggccaaaataaaacagccaacattactcgataatgcggttaaaattgaccgccaatgttatatacttactttctttagggttttccttataatgctaaggtatatatatgaacatttccttgtgagttggcctaaccgccaaaaaaaagtatttcaatccggcatggaaaagtgtccttctcacatgaaactctgccacgtttacaaagtcatatttactaggtagggggaaaagcgatggaggggcaagatcgctggtggatctgcccctcagtcgccatagccactggatccaccctgatcggggccacgattgacgaattcaccgcccttaaggctgctgttgtcgtcgtgaccaccctagccaccgtcacactccccgctacgacaaattcgacgcgtccgatccatagcctcccctacccaccccttcaccatcaccggatctagcggtcgaggagaagagggcgagaggactgaggagaagagggataagtagggagaagaaatgatttaacgcaaggaggagagaaaaggagtgggagccaactgggtaccaaaattcgcatgcaaacctcttaagagatctggctgtgaaaataaatttttgtagctgggccattattggacacctcctaaatctttttatatacaggtccgcatgtgaagaaagcggtgcaaaagttatttttaagtagtgtatatatgcagctatactttttttgaactttatgcatatatacttttagtaatttaatttttgtcagacttagcactatttggaagagtttatattagctacaacgattactatcttcaactctcttctaaatagtccaggttcagatattctgtcactcggtagctaagctacataatccagaaaataaaatagggattagggcatgtacaatggttgtcaatagtggtctcttagcattgctaattaggaatacttgttgacatggaagaaagagaaagagtaaagataaaacattgttgttatgcataacaacggcttaacaacaactattaatcactataatatggaaatatggttgcatgaggataaaaaaataaaaataatattaacaaaagaaatattttttgagttaattattagagcctttatcgtctcaactattgtaaagacacgtctctaaataatctgtatctattatatactaaaggtccattaaactttctacaaacgctctcaagccgccatgtgggactcctaaaaatactcttagatcgccacgtagtattctaatatattagaaatatctagccctcgattttcacttaaataggtgggtccattattttagaccattagattagcttagattaaagaaaaagttaattagtccacccctcatctgacgagcgcgtacgtacgcctccctcccaatggcacgcatgtaacatacttgaacgtgccccaccttttttttaactccccccaaacttttttatttaattttgtctgaaatactttacaatataggagtatttatatcatctcatttttatgccgttgatatttttgagcgtatatttatatgcatcttagtattaaaaaattttgagaataaaataaaacattcaatcctcgattttcacgttaaattagatggacaagttattttatacattagattagatctataaaaaaataataccttccaaaccatgtacgtataaatatatagcactattcacctaaaaaagccaaaaagaatcatcctgtgtacgtacttactccattattcactgatgaataaaaatatttttacaatgtgagatataaattggtgggtctattattttattttagatttagattagattaaaagaagagttagtccctccctctcatctcaccgtgtgtacgtacacctgcttcatcccgtttgtacccaggtaaggtatgtgccctcctttctttcactctccccatttaccccttttttaccctacaacctctattttttaggatgttttaaatagcgggctaatacatttagcggttagcttcttaaacagatatagcggcagctatagtgggttaaatagagctatagcggctaaattatacatgagagcaaatagctaaaacccttttcaaacagctatagcaggagatttaaaaccctgcttttttatgctattgacattgtttgagtgagtgtatatttgatcattcatcttcgtattaaaattatgtaattataataggagattctagaaattccgaccttcgattatcacttaaattggtgaaccagttattttatagcatcagatcacatctattaaaaaataattcctcccaaaaaaaaatcccgcgtacacacgaatacatagtactgacaaaaaaaagccaaaaagaatatcttgtatatatacgtcaccctacttataaaatttgcatggattttaaagaaaatgaatggcctatattagagagcacctaacatctaaacttcctacaaactctctcaagccgccacgtgagactcctaagggcatgtacaatgtaaatgctctaaaaacactcctaaattgttatatggagttataataaattataaaaatttattttcattaaatcggtgaaccattaattttaaccattagatctatctaaaatacaaaattccggtagccagcacgtactccctccctctagccacccccaactcttcccttctcccttatttctagctaacatagatctatcttaagattttgaaattacgctcatctggaaaaagaatcacttgtagaaaaagtcctccaaaattcctaatgcgcgatcgctcgccaggctcgatcacccccttctccacgtgattttttttggcaccgcattacttttctattttagtaaatttttgcacctaaagtttgtacacctcaagtttacatatctaaagtttatacacctaaaatttagagacctaaagtttataagtcaaaagtttatatatccgattcaaatttgaatttgaattcaaatattttttatatatagtatttctatacatctaaactttatacacctaaagtttatagacccaaagtttataagtcaaaagtttacatacccgtttcaaatttgaatttaaattcaaatattttttatatatagtatttctatacataaatttttttaattttgtttttttatttttttaaaaaaattatgttgtagtaggaagagaagaaggggaggaggaaaggggagaggaccttatacgaggggatggaggttgatcgctccaggcgatcgatcgcccattagcgtcacccaaagtcctctatcactccatggacgtgcacgtacatatgtacctaccctcctctttgttctttcctttttttcccttctaggttagatgagatacaaaatcaaaattcgtattaaacttaaaatatactctaataaattagaaaaaaatctagaaaatgtgagaaaaaaaactacaatatctagccatcaatttttaattaaattgatggatctgttatctccgaccattagattaaatcctatttataatctctctcctaatctctctcagcgcaccgacgagaaaggtacgtacttacaacttgtaaaaaagctgaaaatacatatacaactgcaacacacatttaaaaagataaagtggaaaaacataaaaatataaattatgtcattaaaaattacatttgcttccttcttcttctttctcttctacatgtatagacgaaattgtaattattagtagtggtaataaatttgaagaaattataactttataaacatagattatatatatcatcatatatatatgtctaaattagattcacaaatgtttgaaaataatttttataaaactatattattttaccatttatattaacaatataatattttttttacttaaaccgatgcatctattatatcaaatcattattttatatgaaaattttaaaaacatgttgtttaatataaatgttacgcaataatattctctaccagtaaattgcccatttatgatctatgttaactaatattttacattaattactcaacccactattttatactatttttaacaaaatattttgatatcggttttcacttaaactgatggatctattaattagacctattaaggacctattaacaagcatgccatatctatcttttataaaagtaaaatgaaacttctaaagaccacgcacatgtgtatgtttgccttctgcacgtgtgatgaagcatcgtacctgaggcagctaaggtgatatggtgatccgataaacactatacataccaattaaatttatataattttgctcttatttcaaacaaatatcgtttcgaagaaaacaatcaaacatgcgaaaaagaaaaaaaaagaaaagcttcaaacaattgctgatattttgcactacccaacaaagcaattctgcaaatgatttgtgtcctaacaaaaattctttaaaactttggaaaagaatatgaaaattttgaacttctacgaagggaaaaacaatccaaccgttaatctatcctaatttggttgtcactaaatcgtgcatcttcatgagacgattcgatcacaataattttaagtccttgctatcgcaatttttacttgtagcaatattatatagtatgtgtttaaatggtgtacataatatttacttttcgcgaacgcgtatacatcatatttactcacttagtccaaaagtaaattcaaatgtcatatgaccttgatctatcttctaagtcaatggttttcagatatgcccgacctatagtttgcccttataaaatataatttctattatgatagcatggatgcccgcgtatcgcgtgggccaccttcatagttgtttaaaaaaccatacacgtctctatcattgaacatgcccttagaaggtaggtaagcctacgtgtctttagatcatcgctagcacgttattgattcaccgtcacaggctaattaatcttcgtatcttggaaacaggaccgtagagatttgacacacttgaccattcgccaaaccataatttaagcgtgtgttaaaattagaagacgcttaaggacgtgtatgtacacgccttatccacgtaattagtcatatcgatcgccaaagatcgaatatgcatgcataagccctttgccatgctgcatcattgcattgatatgctgcatgccccacaacgcgcctatagctagctggtacatgtttaaggctttgtacgtgcatacgatcgacctgaccgtgcatcacgagggaggctgatcaatttgcctgtagaaccatgtatggtcagataagatgtgtaggatcagaatgtacgtactaatagggaaagtctttttacttccggtttatagccccttatagtcccggattgcaaaccgagacgtccaatttaaaactaaagatacccattttagtcccagttaaaataactgggagaaaagataaatctttagttacgattgataataccaaccgggtctaaagatggtaacaccacgtggctggcgctaccatctttagtcctggttggttagttttttttttttggaaaaattggttcattgtttctttctgcttccatttattgtcaccctcaaatcctcacaaattatgcacaacaaatcatctacaattgcccatccaaaaaaatcatccacaatccccaagtcattcacaaaatcatccctaaatctaaaaaaaaaatcacaaaaccacccagccactgcctcccggtcgcggctgcctgatgttggcgccgcccggccacctcctcctgacctctgccacctcccggccggatctgccgcccaggcacccagctaccaccacccggccgccacctcctggccgccgtcgccgtcggaggaggagtgaggagggggaagaaagggggaggtagagagaaaatgagaggggaggaggagaggaggatgggataaggacgagaggcacagcgcgcgcggctcaggagttttcacggtttttagagcttgggtcccggttggtataaacaaccgggactaaagatttatctttagtacctgtggatttttaaatcgggactaaagatatttttagtcctggttcttactcaaaccgggaataatatgatttttgcgtgacccaacaaagatcatttcttcagtagtgacacatcctgaatagtctgtctgattcatccatgttaaaatataacaacctataatcgaatatgacatatcttaaacaatctgtctgattcatagcccttgtttagatccaaactttttcttcaaacttccatcttttccatcacatcaaaactttcctacacataaactttcaacttttccatcacatcgttccaatttcaaccaaacttccaattttggcgtgaactaaacacacccatagtattaggccccgttcgatctccacaattctggcacgcaaaacgagaaacctccttagcacatgattaattaagtattaattattataaatttgaaaactgaatttatttggttttcttaaaacaacttatatatataattttttttaaataatgcaacatttaacagtttgaaaacaagaaataataaaacaggtccttagaatgtgtaccatttaggaccggaggtcgtatacatgtaatcctcgtcggtgggcgctagctgcatgtgtttgtgcatgcagatcaccaaaccggaaacgtccatttatacctgctgctcatacaaatatactccctccgacctaatataatagattttggaatagataaaacgtattctagtattataaatctgaaaatatttcccatctagattcgcagccctatgatacgtcccatccaacaaaaatccatttatatttaggagcacataaacatgaatgaatgctgtctggacttctcctgtagggactgtagcttggatcctggtccaaaggctgcacgcagccacgcatagtacagtagagactcaatcatgcatctgcattatatgtgacccaacggcaccgcaaatcccacttatcgggctatatacagttcatatttcaattggaaagaaaatcatttcccatttggaacgagacataattaagataccaacaagggaaatgataggaaaccgaatgctaatgatttgatatgtggaccaccacgtggggaaatcaagtgtttatataggtcatttctccaaagttggttcataattaattaattaattaatccctattacactggcttatccgtgttatttatggaagggccaaaaatgtgtaatcaccagaaaatgaaaagaaagatgacatcccaacgactgacgccacagcaaatgggaaaagaattggagaaatacatcaaactactttgcagaaataggatgaagtacatgttttttttacattattggttcgcacctgggagtaaggtcagcttcaaccgacacggtcgaatattttgagtaaacaggtccattttatgaaagcagatgatcgcatgttcagtcgccttgcaggcagtagagctggcggatgttgcctgaagctgaaaaattaacaaaatgtgatttaggggaacccagagctcaccaaaattgagcaagccatatataccatcagcaatgatgtgcatgaaaaagataaagtagaacgaaactcaaagaattagtttcacatacgtaggtgattgccggtatgttgcaatgggatcctaaaaaaagtttcacatacattttgaagtccaaaattatctaattagaaaaccattttagcctggtgagcttgccagaagcactgaatactgttgccatatcgatgtagattttccatctaattaacatctcctattcgtttccatcaatacagcacgggtataccacattaccagacaacctgccagaccgccgtactccactgggaaaggcccagcccatctacaatctgctaacactagctatctcaacaactctccccagaaactcccccagccgcagacaccctctcctccatcgccaactcccccaactgagttagccagcaccgcatggccgcgcctctttcctcccttcacctccagcaccatcattccactctcctctcctctatcctcaatagccatcgtaccgcccctagccatctccagaaccgacttcctcttgttcccttacagttcctcctctggtgagcaaacacagctgcactgcggcgccagccacctcctctaggctctagcacgatctacatcccatcctctggggagcgaagctcgggactgaaaaccagtcacccgggcactgcggtgctctttgagtggcagcaaccaacgcgaccaacaaaagtggtctgctgttacaaagctgactatggcagaaagattcaagcattggacgacaactgcagtagcatgcttggctgccccgtcagatcaagcacgtggtctttgagaagtaccaagcgccgttccaacttctgagttccagggccgtggccaggtagagtgaatgcgagcaagcaagatgtcggttccagttttccctcacgtggctcattggccccacgtggcagtggtggtgggtggtggcagtttcaccactcaccaccaccacaagaggcttttaaagtagtatagatgtaggtatgttgtacttaatactccagctgacatgctgaataaaacggattcagaatcatgtggaattggaagcccagaataatggttcaagttcattatgtatggccgtcatactctatactacacctatattggaaaaaaaacacttattgaagctactaggttgacccaatcatatattcttgtgacaggtttgtactgtattagtgtgcacatttgattgtagctacccaacagtacataagaatcctcatgctgagcagtaattactcattactgagcgctccattcatgcaaatttgtttgtatggtcaaagcaaacaatttgattcttgacactgtttctttgaagagactaaatttcagaaagcaaggtgcaattctaatgacttaggcaaaaccatcataggcaaatggcactaaaacaagcataaaggagatatgaatgcattagcaactgaatgtacagatgaaaacttaccatataaccaatctttgaactgtgcatggagggcatttgtcaattccttcttcctattgtcatcaatttgcagctcccgaatagtcctcctaatatcttccagtgcagcaagctgaatatgaatggtgtaaacacagagttgaattagaaaaatctaaatgaggcaaatgtcagtggtaaaaacaacaggacaaatttttctcctacttcacaaataataaccagatcttgtgctccataactccagcatccctaatgcagctagattcgtacacactaagctactacaatttagacatgcgaattgtggaagaatatcgaagcaccaattatttcaatggtattgttcaatttgtacataaagccacaagcccacaaagtcatggagtgggaaaaaattcgagggttcattctaaagtaggcaccagcgcaagtatagacaaattagcaatgcacatgcaggtagtccgaagtctgaacaatgacctttaaagagttttttttaagaacagtaggggacataattagaattaatcaagtcagagcaagagcacctgaagaccaagctttgatgaatttaacaatgcaccatacctttttgctctgggatgcacaataaatttcaggcaatggaaaaggacagcattttgtaggttcttgcacttcagtcccaaaccaactaggaatctgcaggaggaaaacagtcatgatacaacactgtactagaaaaaaaaagttagctgtattataaaagaaaaacaccagctcctactttaacaaagtagcagctccctaccaccactactagcatgtgtttgcaaaatggcctctctattcaagtgcagtggataagatggacaatgcaagcaagatgaatgaatgagttttaatgtatgccatgttatgcaccaatcccatcaagacagccagcagaaaataatatggtgcagattgaataaattcgtctatctgtcttcctatattcatgaagtttagcaaagcagaaggcccaaaatatacatgatgtaccataaagtttgtgaatagatcaggatctagacgagctgcagattcagcctgaacatcagaaacccccgcgggatgggataatgaatcgtgcggatcaacaactcccaacacaaaaggctggtcccatttattgattgcaggatccacaccaacttttgccagatgttcacccaattgtgggtagtaggtattaaatggagcaacctgttggtacagaaaaggagaaatttgactatagtaaaaggttaaaatcaaagcacagtatgttattaatagcacatcaataagttcagcattggacaaacttcatactttcttccagctgtaacccaacaacctaaaaactatgtaagaataagtttagagcaagtttaatagtagagctaactgctagttataaacccacattagagttaacatgtataatagattagctataaggttggctaaatttttcatctcctctctcttaggctgcgttcgtttctccaacaagagttggatgaaattttggatacttgtggcatgcttttcaaactactaaacggtgcgtttcgtgcaaaaattttctatatgaaagttgctctacaaaatcagattaatccatttttcaaatttgtaataattaaaactcaattaatcacacattattaccacctcattttgcgtaaaacacttaatcgttatcttcatcttcatcttcaggagattcaaacaccaccttactctcatttatgcaattaatgcattcatcttggagcatgtgtatagctatctcttgcataacactcatttttcttgttatctctcctccacataagcttacagttgagttatagcctactaactaaacttgctccatagtggactctaagccaactataaggctatgtggaggagaaagaacaagaaaaatgatgggtgttagcttttatgcaagagctagctttacacatgctccaaggtaaatgcattaattgcataggtgagagaaagatagggaagaaaatttgaggcaaccttatagctaatatactatacatgttacctctaatattatttttaaatgggcttatagctagtagttagctctactattaaacttgctctaaagtgtgaaggtgaaccttatagttaagatcattaaacaaataattctttgagagttatctcttcttgatttggtagggtgtatagcattgactttattatgatctccacaaataaattattttaacaatcggtaaacatatagatagtcatgtagatatgaatatattattgagggtgtacaatcatctatataataaagtttgattaatcacttggcagtaacttttcatagcaacaagtgtgtaccttcaattacactattaaaagggacactcacttgtaatttatggttgtcccccacaataagaggttggtgatttactcccaggtagaatatgcactcacgacagttagcaatacaaatccatttagcagctgcaataatatgaactctttcacaatgctccaccttaacaacctgacaacacaaaacatataaagtataattgtcaaatgtacttagcactttagcagaacagaggtaataacagcaaatttgaagtgacaataaaaaagtgtttcttattttccacttggggccctttattctttgttaatgtacagcctatcttatattatgtttaacagtccaactcaacgcatgattaaatctatttgataggaattttccaggaaaagactgtaaaagagtagcaactagcatgtcagtttttggttcacacaacaatgtgtgacatctttcactgtctattgttattattatcatcacctcctcttctatttggacaaaatactcagcactcatgtaccattcaggtgataccaaggcatacacaattgaagtctcaaacagatccggtgcagctaaaatagtctggtggcaactgatgtgtatacaagggtttttctctttaaattgcttagaaaaatatgaggaatatattaatcaatattctgcaacaatgggaaaggagggtgtaaagatataccgattggcatccataccttaccaatagcaccaagaacaacagtagcatcagaacatccatacacagttgcgtacttcaatggtgccaatatgtagataacagactcatggcaatttaaaacctacaaaagctgtttgttaagaaaaccaaaaatgtggagtcccacctccatgatcacaaaattaaatacacaaagcagctacgtcacaatacaacacagaagtgggaatttcttgaaatagagtaaaacataatactgacacaaacagctagaagctggagtctgcaaaaaattttcatcatgagaacagttgtcatatttgttttctcatcccaattctacttagcagcctatttccccgcgtcccaaaatatagctatctaaatttttcgcttcggttttaacattttacatatcctggcccaaataatgccagtttaagccatcatctccttaatcacccagatgtggctaacaatgtttttccctttcaaactaatactccactggaaatccagagattaaaacatattctttattgtactaagagtagcactagaataaattattacattcaagatatgtaagcatatgaaaacacttgaaactgttttaaactagattcgcataaatggttctttttatcaacattaacccccccccccccccgggggatttagtggacaatgcaaacatgtagaaatgtgaaaagtgacatatctttgtagtcttttcagcatccaaaaatagtttatggtaagcagctatgatccataccttcactgaatgtcctttgacatcagacgcgtgcttgacaacagaagttttggagaagccttccacaaatgttgtgtttctgtagtatgcaggatttgtaccagtcggtgtgctgttccttgcattactagcattggcatcagccattgtgacgtctatatcggaagtaacctgctggctaacttcctttgatatggacttctcggtagagaattccagtgaagcagatatattctgtgagatccaatcatgaacctgggcagcaggtacaggggcagcaggcatgtcaggatcagaatttgcaaaaaaagtggctgcctggcttaagggtgttccttctgagaacttcagtagaaatccaaggtgttcaaatgtctccatggtcaatacctgcacaaaaattgtgaaatacagttattttacattctgaagtgtaatggtctaccaaagcccaaccacaaagaatcctaaggaataaaaacctaaataggacgcacaaaggcaattgccttcagaaaatgccctcaaatgtaaggtgacaatgtgacatgtatcctaaatttaacaaaaagatgagttcttacttgggccagatatatctaactgggtcaaatatatgctacctttatatttgcttgtctatatattagtttttaaaaaagaatctgctatctcaaaacatctactgatgggtggtcttcgttttttttctttttttgcagggcaccttctgagtgaagttaacacctaattgaccaaaagcatactcatacatcacaatatatttagaggtatacttgtctgagaggtaggtttgcatataattttacaggatcacggccctggagttccaggcatccaacacggagatgtacttttacgggtcgattctagtgttttgagatatagaaaaacaaataaactccattatcagaacatgctatgcattattctgtcactcttttcccacataaagcttcactctactaagaaaacaagatacaaattgtcaaacagaagagtaatcaagtggatatcacaaatagcaacaagctcggcaaacttaaaagaaagaaaaggctgcgtaccagagaatcatcaccttcgccctcaacagaatcggccaacagagtaagaatattggccatatgcttttgcagataagatagctggtgaatttcctcatcagcttgagaaggcatgaatcgacggctattactgcgtacaagctgcgaaataatataaatataaagagtaagtgaaggaggtaccatacgactcatattagcaaaaggaacagaaggtgtttttatgtcttttgcttgatctgttggtttggggaagggaaattgggattgaccctaaatgtaacacctagaacaattttaacatgtaactgaggttggtagcgtaaaagctttaaatacgagaaattgaataagtaggagaaatcttgattttacaaaaactttatacaaaaaggcatgaatactaaccctctgtagccactgttaccacccaaaccagaaaaggcacagggcataggatttcagtttaaaaatattgctgatagacgaaacagaggtttagcagctgggaattttgtaagtcatatttgaatgcaccatagtctccaaattttgaaatttgagctaaaagagtggaagtaaaatattgtgcctatagtgaaattaccaggtttgcatggttccagatcaaatcgaaagaattaagcaaacatacaattgactgaatctataacaaaatggtcacaacaatgactggtcgctcaattatggcaaagtctgtgtgcttctgagtttactgttagcatacaagtccaaccatcatacgtaatttgatgcaaccaaccattcatttctgacggccaccaataaaaaagataaccttaaattgaagtcaagaagtgaccccagcatacggtaccatccatagcatccaataagtatcagcagctaggatcttcctttgcactatatatctagagctgcacgactttttactgtggagcatttcttatagctcgagtgagttacatcacatatcaatttttgttgtgacagcagataaacggcagcatcagctgcaacatgaaggatataaggtggcacaacagccgccttgtttaaatcgacggcgatgttctaagctcaattgggcacatgattaaggctaagcaatcacacatccaaggtgttctctgctgcagaggaatcatgggagcacccaaattctaattataaagcaacgggggggaggcctagatccctgacctggatcggggagagcgcggagaggtagccgtcgaaggcggaggtggagggccagacgtcggtgacggcgggcgagtccttgtgcgcgcggggcacgaggcgcttgtacgactggatgtagaggaagagcagcacgtcgcggaggtcggccctgcccccgccgccggagtccagcgcggggtcgtccgcggggagcaccgcggcgagcgtggcgagcgcgagcgccgcctgctcgtgcgggatctgcagcgcctccgcgagcgccgccgcggccacgcggcctcctccatccgcggcggaggcgagcttgtccttgacctgggcgagggtgtgcgcgagcgtgccctcggggaagatgagcttggggatggggaggaggccgtgctcgaaggcctcgcggcgggggcggagaaggagcggcgggggggacggggacggggacgcggctgctaccgccggcagcgtctgcggctgcggctccggcggcgggtcgagggggtcgtcggccatcgccggcggcgaggaggaggaggaggaggagatctgggaggaggaggagaggagggggagagtggcggagtgcggtggcgccgcggaaatggcgagaagggatcgcaggggagcgggtgatttttcttttcttttcttttatttattagattatattaaaattgttttccattatagtgggaattttgtttggtatagaaccaaacgactcgtttgttagagctttaaattctaaatttaacttcatgaattgggtctagtataaagttgtggggcagtataaatctagctccacccttttagcagtttcatcttttcacttatgcttatgcttattagccaaattttgaattttcaacgttaaatttggagttgattttgaggttttctcatcgaagtttatttttcaaccttgctttttagatcgttaagaacacgtatataaaagttttatttgcagattatttagcctagttcattttgtgagagcgctctagccagctccactccaatttagatgaaactgaaattgtttggttaggcttaagatccaagagagatgttgctatatctggagctgcaccaaatatgcccatagtaataactaggtgaaaccccgcgcattgctgcgggaatttaatatgataacaaaaaaaataacgtgtaaaataactagataacatcagattaagtaaattaatgtggtttatgataatttaaatttaaatagtatgtagaatggttattcaaacgtaaaaagtaaggtggtatgactttatgaaagaagaaaagtagggagatagtttggaccgtaaattaatcatctaaaggctaaaaataattgatgtgatatgacttaattagaggaaaaaaggagaaagataatttggaccatagattaatcatttaagcactaactaagtgaggatgaactatataagtatataggatatcataaaacataataaaaatatacattgaaacattatgtgaattgtgttgaatgataatttaacatgtttgtatttgaaaagctcttaaattataaaaactataaatatatagcatgtttgcatgatgtttaaatgtgatgattgttagtggatgatgatgtgacatcttgttaattagtggattagtagatgatgatgtggcatctttgcatgttaagcttaaggagttagtgggggataactttatagtaagataggataaatgggttttgtagtttcagacatggcaagaagagttgatagctctagcaatccaacgttggttgttggccaaaatatggcacatgtaaggccatgtacaagtgtacaacccgtattaaatcataagctattaaccttgctaattagaaatatttgtgaaaaaaaataaacaaaatatcgttgatatagttaacaacagcacaatattgattcttagcacttacagaaagaaaacatgattacatgagggtgagaaaaaacaagaaagaacaacaataaacaaaatttgagttttcgtcgtctcaactattatattgtaaagatattatctctaaataatttaagagatcatactaggctctactattgagtatgtcctaaactgtgttttttatatgaggaaacaaatggtttaatctatcatttatcgatcaaaactggtaataatttattgataaattttttatagtcatatgattgtaaaaataaaccatgataaaataattatcaaaatcagtttgaaaattaaatatttaaatttaaattctggctacgggtaataagccaaaagacaagcaaaggagtagtttatactttttgtagaaatataaaagtttccagttacaattttgtggcatcgaaaatattctgatttattttaattgcatcgaaattagctatttattattttgtttggcagttcattttgtcgcggatttttaactctcaaaatttagcagtaccaatgtttgattaggtagcaaactaagctactcttagcattattacctttccaaattttgttagttcagataatttcctttcatacgaacactatcaaactttgctaaggttgtgttttttttttttggggaagagctgggaattactattgctcaaccgactgctaaggttgtgtttgttgttacatttctcaactcatcttcctcgttttgcgcgtacatgctttttaaataactaaacgatctttttttaaaaaaaatacgaaagttgctttaaaaaatcatactaatctattgtttttaaaaaaactagctaatattttattaatcatgtgctaataagttatgcgtaggacaaactaactcagcctaaaaagttgacaatggccaaaggtgtcaataccaaaattgggtatgaacaagcccttagttacactggaaggccgcatttggacaacctattgttgaaatttctagcagtccgaaaaaaaaaagttgaaaaacaggcctaattttggaccgaactgaggcccatagagctgatgcctgatcgtcgctggcccgtgggccgtttcccaactccaaaacccacgctcgctagctgatgagaaacggcatgatgggaaaagagaaccgaaaatttcagaacattttgaaattaattatgttcaataattttgtcagtaattaacttaaaattacattttcctgtcacggtttcaaggagcatgcaggaaatatatattcattttcttagatcgaccgagtagaagattctaatttctaaaagaacaaattaagccgtcgctttattacaagagactccatttgtggttggaaacagttgcttttgtaatggtcaagttcttttcatttttcaggatccaagacttgaccctaattaggacaaaactgaattttccgtgcttgtgaaggaaattcccacggttaattaatcgacatcgatcacttcaattcagattggctcctattggtcaattttatttaggacatcttttttagagctcttatacataggtcaataatgtcgttattgcatttgctgttttctgaaatcgactcgtacgtgatcgttatatatacactgaattggaataacttatcagaacacagaaaatccatggaaaacaaggcaattccttcagaatcataacatgggttttccaatccaataattaaacaattagacacaatttagcatgcatccatgtgaaatgcagagaccatatattgttcctgtttattattgtagagttgactttaattagcatcatctttgtagtgaccccaagaaggtcaagatatgttctccctgaccttttgtatcttcttgttttcattttgtgttacaaggttatttggctttgcctgtttgttgtagccgacctggccgacagcatctcattcaactgtaatctgaaaccaccaccactttcttcttctctgactttttccattaacccagattgttcttacaacatcttctttcttttttcataaaacattcaagatatcaataatactgtctcacacattcatataacccatagaaatattttaaaaaaatacagctacgttaaagttttttgataataaattctctaattctatttcacacatcaaataatcgttgtatatttttttccatttactaatgatgggttaggatttcgacattcgattatatgtatactaaaacatcatctatttgagaatggacgaattacatggataatgaatgcatgcacaactatctcataatcccttctgttaattggtttcgaagtctgacccgatacctttgaaacaaataaattaggaagaattttggaggaggaagaagaagaaatacaagcaacttgggttaataattataataaccaacatgtcaattgggcaatcttaaattcttaatcctgccggttagtttcatgaaccaatccacccacgcaagcgtacacgcgcggaacacatgctcgaatgcatggactgaccggagaaaaaaacaaagtgattgacaatgtaaaagatggatgaaaatgacatttccttatcttctaagagaatccgatatatgtacacatttgaagtgacaacttatatcatagttcaacaagcagtttgtatattcttctgttcatccatgttttttttaattaaggaggggatagattgatcctccgtatgcactgtcacgacattatgttaattgttatgatccactctccctttcagacgcgacaacaatttgtattaaattgattgctagttagtcgaaagatagttcagcacaaaaaacatattatcataactaatttattttcaaagtataataaagataggagcttaattatgccaaacaaaatctaaaaataagggctggctgctcggaatgtaggattttcttataaaatctttacaggaattagtttaattcataagaaaattcttagaaaattattcattccaaagaaggcctaaaactataatatcgtagacagtaggatttattcggtttggaggaatttcaacatatagaaatagaaaagatagagaaatagaaatgaacacgcacacttctattcgaaagaatttttcaagaggtttgatcaaattttttctatgtgttctttttacaacttgtacaaaaggaaaacttcttctgattttcccatatttacattcgtacaaaccgagtaacactcaagaactttttcagcaaaatactcttaacaaaatttaatatcacacatgacaaaaagatatagtatcatttgtaatttaatatatctatctatccaactcaagggtaggttgattgtgcaatgttgcacaaatgcacacgtctccatgggttgggtggagtcgtttagttaggttatgtgattagctaggcaggcaaattaagtgatctctcgatcggcaggtgatttataaatataatggccggcgactaagcaaaagtaaatgacatgacatgacagccgtggacgagaaaaccaatacgtcagcatgacatcacgtgcgatccatttcttttctaagattaagatattttacctcggtttcctttagtacgcttttcaaactactaaacggtgtgtttcgcgtaaaaactttctatacaaaagttgttttaaaatatcaaatatatccatttgtcaagtttataataattaaaacttaatcaatcatgtgttaatgatttttcttgttttacatacatcaatttaatttttatcttcactagaaaaattgttcgtgcgttgcaactagtgaagtctattctaaccttattactactatatggtttagataaggtgaaattcactgtggcaatttcatttggatgtattttctttttaaaaattatgagctatggttaggagtctaatcgtttcgagttagtatatatgccagttttttttaaaagagatttcttatatgactgcttttgtatttgcaaaagtgaactaacttaaaagtcgactcaaataagtacatgtatttccaaaaacgaacgaatttaaaaaccaactcatatacggatgacgtactaaagtactaataaaaaaacatctttaatttttataatagtagagatcagcttcaaactcggattgaaagcctccattgatgatcactcaattcatcaccatcgagaggtccatcgatcctcagctatagataagctgtacaagaaaatcgtacgacgccattgccatcaattctgtggagcccacataagagatgaattgacacgtcagctaccggcgtctaagtacgtgtattaggtacgtatagtgtatgtacatgtacgtacgtgtacacgcacagtttatctagtgttgcattcaggcattcagcattgtatgatgtatgcaaacgcaaaggagtcgtccatatctgacgacacaagcaggcagtacagtttgaaccatatactcctgcacgtacggacagataattaatatatactatagacataattattttttaacaaagtaagtgtacagattatatataattaatcacggatcctaattaatacactaatgtacttacctgtgtatctcttaatttatatataccaattgtgtgtgttctggcaacctaatatttctggttaattgtgtgtgtgatatattcatatatatatatgagtttcttattaaataatcctaagggagatatatatacacacatgcagagcagaacgagattaattgaactggcagtaacagagatataaaaatatatatatgcacgctatatgaaacaaattaaacaagagaaataaggtgcttttgttggctggtttcatcaagtattagttgctatcttctcttaatttaattagttgtttaggtttggtataagaatatattatatactgaaattggattgcatgcatgcatatatacaagggtcgatcatgtgtactaatgctagatagtagctaaatgcaatgcatcattagaggtcaactcattggcatgtattttagctttgacctttacctgtataataatgtgctcattggaagagaaaggtgtagccaacaatgcatgccaggtctgttgctggccagagaagaatcaaacccaaattttgcatatttggatgctgaacatatatacaacagaccggacatagtgcttcatgggtatctggaatttaatcatgtgtcttactaattaattgacattttggaaggatcaaccaactgtggtgtctccagggcccccttcttttgtatccaagggaggaaaccctattaattatgtttatcttgtaataacacatcctttaattgttttctcttttgagtggctattggctcctgaaaagggtggacattgtggttggattaagacactgatgtttcttaactattattgccatcgaaccattacaaaagtacacggtagggaatttgaaattatatatgttcataccgtgtacttttaatttgtaatagtatgtgctatatatacagcaacataaatatatgtttacacaatccaattgataatcaactatatatatatatttgcatctcccctgctctatcaatatacacaaaggcaaagcatatgccttaattaatttgcttaaaaaatatatactagtatatattagcggctagtccaaaccatactttgttttcttgcaggacccaattaattcccaacctaaatcctgccaaaacacaacaagttgagcaaaattaattaacaagaagaaacagtgataatacttaatttcttctgaacccaaaatacccaacaacaatacaagcactagataaccttctttttttttcttcaaattgacttggaccaatgatgaaacacgtaaagatcaaacaccaattaattaacaaaaatcaatataaaaccgcgctccaaaaccagtcgcagagaccgatcaaccccgatccaatcacatatcgtattcgacctttataaaaaaagtctaattattgcctagctttttccatggccttgtaaccactccccttatatttcttgtacaagcactccacctcaactaagctagctactacaagtcctaatacttttgctacctatagctagctagcttccggtcagaagaagctaaggagaattagaagctatgtctacctagcttggaggaagaagaagaagaggaggagggattgcggcgcgatcgatcgacacgcgtcgtctaccgataaattcctcgcaaaatcaatcgatatcatatcgatcgagtctagaggtgatgagatcagatgtgaagtacttgaggagctgatttggtgataggatcgatttaattgctagctgaggtgatcatcatcaaggagaagaaagagatagtttatttgctactggggatcagtgtgtttgcatgggggataggccatggcagcagcagctgcagccacatgatcagcaggcggcttcttgctcagtcacggccgggatgatgatgcaagcttctgcgacctcctcctccatccatggcaacaacatcatgtaaaaaccctaactcctatacgacttgtgcctttttttttcctccctaattcgatcttgttttatcagaacaaatttgaagcaccttgctcaatgtttagcttcttgatccccttttttgtcttatcatcagaactggagctttaattaactccacaattctctctctctctctctctctctctctctctctctctctctctctctctcttgatgctgtctttcttggcagtttaatttgttgtctcttttacttttctttcgagattatggagtgcttttttgaactttcaagattacagaattgtttttcatgttttaatttgtatgatgcatgaatgggttgattactaatggtgcatgtttgcgcaagataagtaactttatcctggttattaagggttttatttggtgtatatttaagcatctcttaattaatttgaagagtggtattcgaagtgggtgtacttattgtttgctccaaatttaataaagcgatgggtgcaactaattctactagctggtgccgaggcttttcattcatttccttaattttgatatcttctaaggatttttacattttctaatactggatttgtttagcaaacaacgtatattccaaaaattcctttttttattttatcccctttcttggagcaggaagcttagcttctcttaccaaaaccttaaaatatgcagaataatttagcaactactacagctatagctactgtcagatcagatgataatataattttgtgatgatttctccatttgtattaatttgtgcaagtgcagcagaaaggatcctgggggaggatacgacatggcagaattggatcacatcttcctctacctcaacagccaggatcaagcatcagcagcaattcaagaacaacctcgtaagccacatatatatatgcacttattactgtcaccaaatcttcagacttttcacaaattatgcattatattcttctccgaaaaaagatgtgatcgacaaggatgcagagggagaataatctttctttggtcatattaattaattaatttcatcagatatatagcaagcaggccggcaagcatctcatctagctacctcgattttgacaagtgaatatatatggtcattatcgaatttttcgacgacagatatggagtattagctatctatagagatcgatgagcaggcagcgatggtgatccatcttcttttttccttctatttgatcgcctcaaagctttactcactgacatgtcattttcccaaaattttctctagatggggaggagagagtgacgtataacaaacacctggagatgtgtgtcgttcttgctaggatgattatcgtatatacacatatatgtaatgctaaagcaagctagatatatgcatttttaaccttaatcatccagagacatttgcaacaacgatttgcatatatatgtatatatactactgctagctagctagctatttacatatctaggacatcaaacatgaacacacacatatatattctctcccttttgttcactttttcatacttttaatttacattaggaccataagtgtgaaacaacagaacttacaaccacatgcatgttgacatgctgttacaccatttgatatatgtgttaatatattaattaatgccatgcattacatatagttaatttggacaatttagttcatcaacatgcatatatttttggacatatgtttctcagtattattctgaattgctactttactgatctctacatggatgcagaaaccctcaacatcttcccttcacagccaatgcacgccggcgagccttctcccaagggatcatcatccatggcggctatcaactcggcgccgtccaataacgccctcgccatcgccgccggctcttccaagcggccgccggcggcggcggcggccggcggccagccgtcgaggctgaataatccggccgatcagccgtcggcctccgggaaggacggcaaggctgccgtcgtcaaggtaacttaattagctccgatgatctcatcatcttcgtcttcagctgatctacgacattctgagtggctcaagctcacgcatgagtttgtgtgtgtgtgtggtcgtctcgatcggccgatcagaaagaaggcggcggcggcggcgggaagcatcacggcggcgcatcgtcggcggcggcgtcggagcacgagggccccaagacgccggacgccaagacgctgcggaggcttgcacagaacagggaggcagccaggaaaagcaggctaaggaagaaggtaatttgttaattaattaagttgcagttaattatagttaattactcttgctctacctggctggtagggtagctgtaaatcgagattaattaattacctgttgtttaattaaccgcactgccatttcaccctactttacgacagcacaggagtatagacttgtgcagttacgacgttcttactccaaatttaagtcaaaattaaaataactaacatgtgtcatgtcggatataaaataaagtcaaaattaaacaaatgagtttgcatgcatgtgagtgtgggggtacggagaattacttaccacctaaaatggaatatagatgtgcaacattactggctacgtctatctgaaaattacgtttctcatgacacttaattaactatgcttttttttttaaattgtgtctcgtatatggatcaatgtgtatataggcttacattcaaaatctggagacaagcaggatcagactgtcccagctggaacaggagttggtgcaaagatcaagaactcaggtacagcatatatacatgcaaatgctcctgaactatacgatgttttcagtaaactaattaattgattgatttgtttcatgatgcatgtctaacgcacgtatcaacatagggtgcaattttgggtggtggagctttttctgccggcattggaggacaaagcccaggtatatataatcatatatgcatgcatacgatcaaaccaaccctaattaattattataattaaatccatataatactcaaaaccacataatcaccaacaaattctctaattaatttgtttactcgttaattaattcatcattagatcaaatatgtcaggaatgaatgcagatgtccatgtgcaaaaacacacaactcttaatttttaaaatacataatggaaacaactaaaatttttaatgaatgcttcctctgtttcacattatttacgttgggttttaaatagatttatacatagatccacgtatgtattttatatatgtgttcaaaacttcaaattcatatgaatgttagtgaatctagacttaaaggattaagagaaaaaaaagaacatattataatgtgtaagggagactaatcatcatcgtcgtcgtcatcgtcatcgtcatcatgcagaggcggcgtggttcgacggcgagtacgcgcggtgggtggagagccacgagaggatgatggctcacatgcgggcggcggtggaggagcagccgcagcacggcggcgtggcggcggcggcggcggaggcgcagctacggcagctggtggacgcggcggtggcgcaccacggcgtgctggtggagctcaaggccgccgtggccagcgccgacgtcttccacctcgtctccgggacgtggctgcccgccgccgagcgctgcttcctctggattggtggcttccgcccatccgagctcatcaaggttagcacataattaattgaatatcttatataatcaatttatagataattatttaaagccggctttatatattatatattaaggattcactaccacaaaatatcatcactgatgacttatcactgacggtttagtgtaaaccaatggtgatatatatagagagatagtactaatgccagttcaccatggttttacccacccaaacggatctgaactggcagtgatatttttacttgacgttttagatgttgatatgatttatcattaccttttcaaatcaaattaatgtttatgaaaattattataaatactccctctgtcccataataatatatatataagggactattccctttttataagattaagaatagcgagagaagactaaaatacccctattaaatgagatttggtttgggtgaggggatagttgagggtcaaaataggtagaaatttgaattgaagttgatggatgtgactgacagtagtacacaaaaatctttgtgagacaattagaaagggcaaaatcccttgtattatgtgatagagggagtataactatatgaaagagttttcataacaaataatccactaatatagggcctttcattttgatgtcattttcaaccataccatttttttcgcaaagttgctaaaaaaatatccacgtttagtgtgttgccaaatttgatcaatacataaaaaatcctgccaaaattttggcaatattgccatcttaccaaaattttagcattgccaaaacttggtaaggtttattttggctataatctgaacagacccataatctcgatgttttgaattgcaatatactttttttttgcatatattgatgagttaggatttcttcatttttaactggataaattagcacgtcatccttctgaaagcagaggtaaattataaaagatgtgttgtagtataggcaccctttagattttgagatactagctagattatattggatttttagggtttaagggcgtctacaatatatgatagacatgatatagtcagataattttgtgaaacgcgtttagttattggacatgttggagtacgtatttggctagctgcgcatgccgcgctctacatatataatacataaaaacttaaaaataaagagagatgggtttatacaatgtaatagctaatgaaggggaggatggcatcaaaatatatggtaataatttttaaagaaaatagcaacatatatagactatatggtgtcattcatcactatatacaaattaaatatgttaatatgataaaattcggtttacgttaaaaataaaaaaataaaacccattgtctatgttccaatatgggtatgtagaatatggaccgagagacagaggaaggtgaaccaagaaaatacatgctagcttcaagtttgactaagtttgtagaaaaaaaataatatttttaactcaacacaaatttattatgaaaaatatattcaattattgatttaatgaaactaaattgatattatatatattactatatttatgcataaacttagttaaatttgaagtagtttgactttgaccaaaatcaaaacgtcttacaaccagatctgtttaatatactagagcgacagaagtagcagtatattagctagctagtatactaggttaatatactgcatctgtttcagatggagtattaattaactagatcgacataactgtatattactcatatattgcatgagctcaggtttccataagcttgagttcaccaattaacctactactccctccgtttcaaaatgtttgacaccgttgactttttagcatatgtttgatcattcgtcttattcaaaaacttttgtaaaatatgtaaaattatatgcctacataaaaatatatttaacaatgaattaaatgatatgaaaagaattaataattacttaaattttttgaataagacgaacggtcaaacatatgctaaaaagtcaacggcgccaaacatttcgaaacggagggagtatatagctagctaactagctacctgctcctcccgatattttttttcttttttgttacgtacgtttttagtatattttgactaaaaaatgtcatcattcttcctccgagatgcacagcaacatatacatgcatgtttgtttgcagcacgtttcttccatcattccatgcgtgccttcggttacttcgttcgtcctcgtgcatgcatgcatatacatataatatttgcttatatcagccagtgcacaaccaaacacgctgctcactatacatggatgcaggcaaccaaacacgccctaaacatgtactccctccggtttcaaattagttgacgtttggagcttagaccttttggatgataaaacttggcgttttagcttccatgtgattaatttaaactgatttacccatgtatggctgcatgcatgcatcaactccggcacaagacagtaaaaagatgctttgggactagcagccagccactaggttaagaggatgtgcttgttagatgtgccatcctaatgtatttaatatggataaaacatgaatatgcaccctaactaaccatttctaagtatgtgagatcctgtccaaaacttcaattaatttaaaaccggagggagtacaattaatagctttacatatatttaataaaatacctgaaataccctatatatacgtgcaatatttatggatctgttagtgctctaaatgtataagtatatatatatatatatatatatatatatatatatatatatatatatatatatatatatatatatatatatatatatatggagtatatatttaagttttagtagtgtgtgtagtagccctatacatacatagatttccattcatgcataattgcaaaaaataaaaaaagtaattggaaagaagcttgttagacagtattccatagtacaccagagtccagacacatatattaggtactccaactagaaagaaagatgtatgatgggttagctagctatctatcttaaaatattgatttaagtaggtgagaggtcccagttgatggaacagttaggctcttggaagtctttgatggctactaatatgtggttgttattttctgtgttggaagaaagtagtgtgcagtaatgtacaacggagagttggtgaaggaggcaagttagataagagtgatcaacgatgtagatggggatggctaatttaccaataatgcatgtagagaggatgtgtatacatactttagcaagctaattcttctagatggacagagtcctagctactatctaatacttgcaaatctcataaaaagctagctagctacattatattatagtagtactatcatatatatctcataaaaagtagctaactagttagtaattagatatacccttgttaattaggtactctaattttctttgcgtgttccatcatcaatatggtatttctaagatattatttttacgtgtcgtcccattaccgatatgatattatttttatataaagtaagtataacttctgatctctatactaattaatacactcatagcaatatttgtgagtattaatactcatagtcatagtcatgcatccacgactctatcatactaatataatattattaagtgatactacatgaactcgaatagttatatttgattatcttgcgaacctatatataatatgattacataactataaatattcttcattattattgtcgaaaactaattgaaataaaatgattatgttgctactagatgatggcgcggcacgcggagccattgacggagcaacaggcggcgggtgtgtacggtgtgcagcagtcggcgagggagagggaggaggcacttgaccgcgacctccacgccacccaccacgccctctccgatgccgtctcctcggactcactcctgctcttccctcccggcaccggtgccaccgcatactccgacgtcgccatggctcacctctcccttgccatctccaatctctcctccctcgaagccttcgtcaggcaggtacgttgttaattactccatccattcaaaaatgtataacgccgttaacttttttacatcgtttgacaattagtcatattcaaaaaaaatattatgacttgttttatttcaaataaaatataatctttacttatacttttatatatttatactaattttttaataagacgaatttgaacgaaaaatcaacagtgccatatattttgaaagggagggagctaagtagttaccacacgtgattcgatcggcttgctaattgtagttgatttttgtttttaattcagttgatggctgcattaggttggttagttggctctggattaagtggtggattgtacaaaactgtgtggctgcttaggctaattgattatctagccagctagctatagctgttgtactgtctccttttaatcctataactaagaaaccctatccactaatgatcaatggtattggctagctgggcattttaatttgttctgttcccttcaacaagagcccatacttagctagcacctagctagctagagccaggcaattggttaataattaattaattacagtgattgaaataaaacctgaaattggataatctttttcttattaacagctagatctctaattaactaaacttgcaaaaggcatttagtttcgttaccacacaagtttaactaatacaacgaccaccgtcttaaaatataacaaactagaactgaaaagggcatattctatcactacgaaactagtcaaacatttgttcaaatttgtattattaagatgtgttctatccaatatttatattttattttaggatggaaatagtaattacttgaataactccgtatatatatactatttgtatgataaagaaacataatggcgagtgactcttttaatatggatctaataacattcattttgtgttataaaaattcacactaataggatgattgttgctcaaacttttgtcctaacaaaataaaatacttgttagaacctcattggttgctcatactctctaataaaccaaaacggcttattagggaataaaaaataatttatagttaaaacttttagggtgaatagccagttcagtccttcaatttttgttcatgagtcgaattagtccttcatgttttataatgtccaaccaagaccctaaaaattatcatgcggcttaatatagtccttagagccacttaaaacaccacgtggacatgccacgtcattcgtgcatgtaagataacatttaaatgtccattttaaccttcaattttctatcaaataaagaaaagaaaaacaagaagaagcaatcataaaacaaagaaaaatgttaattttttttatctatcaatgctacatatttttgccaatggtcaaaagctttttttttgtgtgttttctcaatagttttcctttatttcctatgaaaacataagggtgtaaaggacatttaaatattgaatttgcatgcatagatgatgtgacatgtacacatggcatatttagagggttaaaggactatattgaatcacacaatgaacttaaggtacttgtttggacaatacgaaatgacagggactaaattgatccttaagcgaaagttcaaggatcatattgggtattcacccaaacttttatatatttgttcgcagcgatttaaaagcactaaaatgaaatcacagtgaaaatatcttaaaatcaagtttaaaaatttaaattttagcttctgcttttgcttggatttattattaggccaaccgacgaggctcttatacaactttaaatataatgcacgagtactctactgactgatgaactgatgacgtacatgcgtatgatccaggcggacgcgctgaggctgcagacgctgtacaagctgccgcagatactgacggcgaggcagtcggcgcggtgcttcctcgccatcgccgaccactcccaccgcctccgcgccctcacctccctctggctctcgcgcccgcgccaccccgaccaacccgcccctcctccgcctccgccatccatcaaccctagaaattagaccacatccatccactggccctggagatccaatggcccagcatctacactgctacaccactgcagttttacatacagacagacagacaggaacagattagtttcaaaagtttcagaatactacagtgcatagagagatgatcaatcgatcaggccttaatttgcttctttgacaagatcagatgatttcatttttaaattaggagggtagcagcatgctgtaattgtgcatataatgtataagaaacagaaactaagctgtatactagtagctgctgatgataattactagtcagtatgaaaataagtgctgagattgatgatgacactgtaatgtttttgtcttgtggcatatggtttgactgactttgcttcagagttcagacttcagacacagaatagagactagagagtttaggtatgccgcactgtcatcttcttcctttcttgtctcaactgcaaattacttcagttgcaaggttagtagtaggtgaaatttgggacagattaacaatggggggcttagttaacaggtaacgaatgtcaatgttacactcatgcatcttcccaatctttgggaaaacacatatattgagttacagacagaatgtggtatttctaggctcccccactcataaaaatgtgatcttgtcatgtggcatgcctatgagtttcacaacaagcacaccaagaaatgccatcacaaagatgagtttcctctgctgttatagtctatcaagagcatcaacaatggccttgcgaaacgcgtcgttgtggaggaaaaacgacgatacgtgccctccggttacccaccggacctctgaacctggccatgccttttggagctccattatcgaatgtttggggatgtagccgtcatcctgaaaataaagagaacatttgcttcagaccaagctccattaaatattatatgataacgaaaaaagcatattgatatctgaaagtacagaattaagcagatgacaacagtactacagagaggcgtgggtaattattggaaaggagcaactaagatgatgtgttgctgcaaatgacgcaggcaataaatctattttgaatgaatgcaaaaataagatatgagtaatagtaggaaaccagaatgcactagtactggaaggtgataatgagttactcttatcaagaaatttacgtgctaggctgaaatatataagacacaggaagggtaaatcatgtttgagaaatgatgatagaacattgacactaaccgttgcaccaacaaaaatgacagcctgtgggttctttggcactggaaatcgagtgacgtcagtcaaagacagcactgatcgcaacctctctcttacttgctcaatagtgattcctgatttctgggccatgtcttctgtcaaagaagttacgtcttgggccaatgttgctgcatctttcctcaatgcatcccaagctgtggcatgcctgtagagcccgtcacagaaaggcaccacagcagaatgcggagcaagaaatggcagcgtagcaattggtgttgggtgcaaggatccaaccattgcagcatgtacaccacctatgtaattagcatgagacgcttgtaagaaataacagcaattttcatatgtagatggtacttaactactgtcaagataaagttttttcccaaaaaaagccatgccagagttaacctcattatctatcatatagcatttttttccgtgtcaataagcaatccaaataaatagaaaaaggagcgcttccgcaagagagaaattaatagaaggggccaaagtacttgaggtgaaataaaagatatttccttgagaaaaatcatctcagttaccagtcttagggaaaaatgtatcacatcaatacttgtaaaggaatcttgaaacgaagttgccacgaaaatgggggtgagtttgataaatgggatgctgcaggttgcttaagacttaaagcattcacattattcaattatagatgaaaactttagaattacatacccatgctgagcccgcatatgcccatcttgccataaccagcctcattctgcaaccagtacagaaggctgcgagcttcatcaatagtagcttttcctaatagtagcaagtcactcacacactgaagctttgacccatgctgcatgcttggtcgccgttgtccataataagggctggaattcatttgagaaatcagatcttgcgggttaggaaaaaagctttggtatcaaaggtggcgtaagacaaccattctggcattctatacaagcctcacctctcaagaaccatagttgcaatgttgtccttcaaaagaggtccaccaagtcgaagtcttctctcaaacgagtgatcaccagtgcctgtaatattagataaaagtttaacttgacccattgtattagaagcccagatcaaatttcaacagctggacaaagaacatttttgcaactcatcagttaataacatggcatgatatgaaatataatatttagaaccagaaagcagatcactcaatatggaaagttgaaacatcaaatctagtcaacttttatttctgtccgatgggatgaaataaacaacattcagctagtgtacaaacatcaatatctaaaggcttgaaaatagtctcttatatagaaaaaaacatgtagatgcatggtacatcaaagtatagaacaaataaataggattaaactgttgtacctgccagatgaatcacacaggccatcttctcaggtgaaactgacttaggtgtaagaaaagcaactcttgcattgtgactctcaggaggcaatgcttcaattagccgtggatcgcatgtagtcctgaaaacaccctctcgcagacaagaactctttgtctcccaaaccgttttccacatgggttgcacggcagttggtggccagttctggcaacgtgcttcagggaataactgtttcaccatcttctctaacaaatcaagtttggtgcctccccatcctttcgagaaaaatggcgttcctaatttggtgcgatgaaggacggtaccatatatgtggtccagtacataatgtactagcccaagattcaccgataccatatccaatgaatgctagaataatgtaagtttcttaggcttggttataaattacagccgtggacactgagatgcctgcaacacaaagtttagcacagaagctagtcaacaagttgagggttgaggtgcattgaactgtaaaggaaaaatactgatcagcatgtgttaagctaacctagccagtaaaaatgcttctttgagcatatgttgtgcataacatatgatggataactacatttgacaaaagtaaaataggacagtacaacttggaattccacgacgcataaccaatgataagatggctaaatttgagcaaaatcataacaggatggtaaactaaggatttccaggagacggtaattctataactccttggtgtcattgtgtgccctatgaggcaatgagcagaagcaaacactccccagaacaatgcagctcaatttcatcagatagatgcacccgcagaaagtaccaacaattccagggcagctaaaagcaacatctttcttgttagccaggtgaagaacctaaccatccagatctggggaaaaaaaaacaacccgaccaattgagctcatcaacaacgttacatctcaacggcgcaatgcaggtgcggaggtgccaagataagccaaactagtctaaattttatatttcaccacgcaattcgaaaactatctccgcaaacaaactctctgtcctcccccaaccaagcgaacaacggatcggttcagaaatcaaccactgtatatagaacaataaaaacaaaaagaattaacatctgggacacacggggcgccggttccagcaccgcacctggtcgaatccgcggcccgcggcgagacgccgttccttttgccgggagccagacaagaatccaccacgggggggcagacagacgcgcgagaccaagaatcgggggaggggaggggaggagagatcccaggtggcaagaatcccctcgatcgatccgcggcggtcgcggggcggcggggaggcgggaggtggggtcagagggtgggggagtcgcctgcggtggggacgcggcgggaggaggaggaggagtgggctgtgattgggggttccgccattggagaggaggggagagaagcgaagcggtgggcaccgcggcggtagtggcgggcgggcgtacgggcgccggatttgggaagcgggtttccagatccggatccggatgctgctctgaggcggggcaggtggggcccgctcttcagtgagtagagcggagcggggcacgaggcacgaggcgcgaggggataaggtggggcccacctgcggcccacggaaaggaggaaggtctggtttggttttgctttgggccgggctgcaaaccaacttgggctgagttcttttttttttcattttcccaaggaataagttcactttggcttccttaactggaggctgaatctaattcgtatccccaaaccataataccggatatctcgaccctcaactgttgaaactagtgcaatttgacttcttcggtggttttggaagacagttccgctgacgtggcgcctacatggctatattgacccggtctttgttccacgtggctgtgatgtggcgcttatgtggcattagaattaaaataaatatgtgtagggccatttgtcattccactatatatatatatatatatatatatatatatatatatatataatggagaatttagataatataccatccaatacgcatgccttatatgttttaccacctaatccgcacgccttctacaatataccatcgtgactgcgaattcttctatttcgtagcactttcttcactttttcctatatttctcctcggcgacaacggtgacctcgacctcatggacaacaatggcaacctcccctcccctcccctcggcgaccttgacggcgacgggagtacggattaggccgcacagaacacgcccgcagcaccgaggggaagaagggcgacgcgaggttgctggtgtcgaagtggaaaaccccgcggccagcacgaaggcgatgatggcgatgccaaccaccgatgccagcgagttgagcgtggacgtgaggcgcgcctcggacatggccaccgcggaggtgctgatgagtgccacgacggcgatgtggtcgagcagattgccaccgccgctagatctgccgtgggagggaggcgagagggggcggagggagccaccgacgccgccaccgctggatctggcgcgagagggaggcgagaaggggcggagggccgctggctccacgccagtagggagagcgccgccagtggagcaggtggaggaaggggggagggagtggccgaggcggtggttcccctccccgtcgctgatccccgtcgtcgtggaggaagggagagggggtgaccgagaggaaccgataggagcggtggatccccttcccatcgccgtggaggaagggggagagagtgaccgaggggaaccggcaggagcggtggatcctctccccgtcgttgtggaggaagggggatggagtggccgaggggaaccggcagggtgccttccctgtcgccgcgccggcgagacaggaggaagagggggagatggagcggcgccaccggtgagggggagagggagcggcggcgctggtgggggacgggaggggaggggagtagcggctgagagagagggggagaatggaaatgattttaggattagggtttagacttatgagtttttatatagattgggatcaatcaggaccgtccatcagatcggacggctactgcttctcccacgtcgggtcgggtgccactcccaggccgcccacactattgggccgcatgtacgctccgcgtgaaaaaatttcactttagatccctcaagttgtccccaaattgttcccaggccgaccacactattgggccaccacataggccgcgtgtacgctccacacggaataagttcgctttagctccctttatttgtcccctcaaactcctaaaaccaatgcaaatctttaaattttagttaacccgttgcaacgcatgggtatatttgctaatctacttctacttatactacttaaaaaatctaaaatgtttccatcgtccgtaatttataaagagcgaaaaaaaccaggcagaaaaaaaaaaagaaaacgcaccgtaaaaagaagagaacggcggaaaaaaaaacaggctcaaaaagtccgattcgtacgacacaaaaaaaaatctggaaaaaaacaaaaaaaaacaccggctgtaatcttatcttaactaattaaaatattcataattttcctttcatcacaatctgtttcatccatccggtgattttttgtctgtaggaaaaagggggtcttggatccctgaagaaaagctccaaaaattaaaaaatgacgaacggaaaacctcaacgccagccgtcgccgacgccacgcgggaagtccttcgccaccgccggtcgtcacccacgtgcgcgggtagcccacccgccgccggtcgttgccgacgcgcaagggaagtccaccgcctccggccgtcgatgacgccgcgcggaagatgagagagagacgacggggacggcgccggggcagggctgctcaaaggtggcgccctcacccttgggcgagtgtgcgcaccggcgaggaggcatgcaccggcgccgctgcttttcgccgtccgctccagttctggcgagaggcttgggttttcgccgacggctgggagggatgggcttttgtccctccgacgtcggcggccggctattcgatagaaaccctaagatcgaacggccggcactggctggatcgaaaccggcccaagtagaggcgcgtgctgggcagcttccccagcccaggtccaggttgcggcttggggaggagggagtgcccgcacgtgcgcataatatgccgtgggctgaccggcaggccgggaaaaagtctattctaggtccctcggccgaagaaaagtaccagctaggctgggaaaaagtctgttctaggtccctcagccgaagaaaagaagtttaattttgtgaagtagaaatttgacgaaggctagaattaaaaataagaaatattgaaataataatagcgtagagtcacggtcattgttgtcgcggaagggaagcggacggccagatgcggctgctacctaccgtgctacggtcatcgatcggccgtcgattggtctgagtttgctcgcttattcgctggtcgaccgtgctgctgagccaccccgtagatctacccatatcttcagagtccatgttgactcgcaccgtataaaggtggaaatcaaaccggctttgtttttttatctccctttcctcggaactatatttctttctatcatttgagactttttctagcgagcaaaagtaccaaagcagtgtgaaaataacttcggttaaaatcaaatatttttagttttaatacaccgtagcgaagcacgggtattttgctagtacaatataaaatagagaaagtaagcgatcatcagattgatcggtgtagatagatagtcacatgttacagtacaacatgtagatatatagatagtcagatgttacagttaacatggagattgttggacatcacgctcatggttgactgatggctagacgatccagcgagtggttcaaatgtttcttcagaggatttaagttattttttttggttagtttttctgttacgtgccgactccgatcacaatacatggaatggaccttcggtttttatggtttcggcgcaaatccttggctagtgaaagtgaaacagctagctccactgtaaggctaagtttatttcaattggatcatatgcgtcagaaaatcccaaggaaggatacaacttgaggaaaatttgatggtgcttaaaacaacacttgtatacgatgctcatctcgatcgatcggcttgactgcctacaatcaatacctgttgttaagcttatcagcgttcctaaaacaaacaaacaaacatacaaacaccaactccacaggcagtaaactttctatccaaagttgaactgaaagcctccaggaaagccgcccccggggaatcctcctcctccatggaatccaccatcgtaatggaatgtgtattgctggccacctcccccaaaaggattgaaaccaccacctcctcctcctcccatattcatctcatcaagatcctctcctcggtcgtatcttacacgtttatcttcgtccccaagaacctgcaaattgccgattgcgcattgttaaaagacacgcgtggcatctgcagcatgtcgatctgattcgaaacaagcatgcctatagctaaatatgggtgaccagaatttatgttattgggacactttttgtctcggacacatgcagtgtctagcatgatatattttgtggatgaaatgcacttcagctagttcttattcatagtacaacaccagggctagaaacttggaatgcatgagagtattttaaattaaccatattaatagaaaatgtcatctcatagaacattaaatacttagtacagttcaattttgtttatttatacctcataagctgcagcaatttctcgaaacatgttttctgcttcttctcgcttatctacatttttatctggatgccactgcagtgccaacttcttgtaggcacgcttaatctctgcagctgatgccgtctttgaaatgccaaggatcttataccaatcttttcttttgcttaacttaagctgcttttcagctctcattagtgcttctcggattcccatgtcctgagcatgaacagtgcaaaccactgttacatttgtaccaaaaaaatacagaaaaagggcagagaccaagtctgtttgatagataaatctaataaagcattccattaaaagcacatgacctttggattcaattcctgaggttaaagaaacagggaagcaacaagttaacttcctatttgtaatatagctgagaagcaatttatgtaactatcaatattatttgagaactgtgctgtaaggggcagccgtcaagcggggctcacccatgttcgaaattctgaccgccctcaccttttccactagtttaaaatcctgagatcctgttgcttattcataaatacattggcataaagttcctcttcggtggcccactttattattagtagtactaacaatagtaatgtgcaaatctagttttatcaactcatccactgcatgcataggtgctagagaaacatatgcaacctacgaacccacgctgcaaaaagcggataacaaagattgctggcagaagggcaccaaatagaaatacatcatggggaagtaaaagtatcatcagatgactaccgtaaaaaacaaataattgtttctgcatattgtctatccaattgactaaaactagatgtttcatccatttggaactatgtttcacgataatttgattgcagcacaattacactaaaaatattgtgttcccaaatctaaaaggaaatgagatcagcacactgcgtagccacataagcagattatttgatgggaactcaaatagcaatatgtgtgttttcaaaggacaaaaaaagaagatatgctgatatatgagcacacttatccctaacatttgcctaggagggtaggggaaaaaggagataggtccacataaaacttgcctggggagatttctgggcagcctcttttagatcctgaaccgctccttcccagtcttctgtaagaagcttagcttcacctctctgcaaccagtagaaggtaacatacaacaagcagatgaagtaagagactagcgagatctggctataacaactaattcaattgcattgtctggtgcataacttagtttaccaaacaaatatacattactatttttttttgcatcacttattcactcataaagtcaaaacacattatttgtgcatactgaattacattttttgtggtttctgaatagcagttgcagatttcccaagtcttgtggtttaaaatacagaattagaaggacaggctaatgcgactgcatgtctgcatgctcgcagcttgctcaataatgtggcatcagagtgcggaaggagtccaagattcaacattaattgcagggcaatcagactgaaattcccttctttttttcacggaagtttcaacattgaataataagaactttggtttccactctaaattagaaaaatgtgtatttctgtgcatgccaagcaagtaatgtcacctgtgttaatgcatcaacaagttctccatctatgttgagtgcttctgtacagctacttatagcctccttgcctcttccgagtttaaccagaaccttacatagcccaagataaagatgtacattgtaagaagtatgatctggatccattgctagggatgccttgtagtcctcagcagacacacgtagcttacccttggcagcattatcttcagcctgcatgcacaccatttgatcctattactatgatgcagtaagcccctaatttgttgatacaaagaaatcatactcacactcttagtcttcttcacaagatttttcaacccaaaatatgctttcttcagttctgaatgttcagggtctagacgaaggcctttctggtagtgcctaaacaattaatattgtcatcactgtacaaatatttaaagctagcacatttatctagtactgcatttgtgtgtgcaggcacaaacaagcatgcacttgtccaaacctaaaataccagacacgctttacctggatgcaacatcatgatcagcaaggtagtaatatgctcggccacgaagcaacaaggcatccaggttatcttcatcttccttcagaataaatcctgtttctgagataacagttgagtagtctttaagtgctagcaatgctttagccttgagaagcttcgcctgaaaaatccatttttagtactgcagcttactgagacaaaattagatgaaatatttatctgtccatggttcctactatcctctgaaatatacctttaagcagtctggagaaaaaacaagcacaattttgttgatgtaatccaggacttttgagaagtcatgagactcaaactggccataagcagactctaatgcattttgagcctgaagcagttgagataattccttttccactgaagaactcccaggttttagctccaggtatttgctatagtcaccctccgcttccttgtacctagacttcagaaaaaacacattgaaacgagtaagggatacggaaaggtgacacatacgtgtaaaactgacaatgttataagtaggcacatatgcttaacggttctttaatggagtctttcagatatggatgtttttttaataataaagtttagacatttttaggacaagagaaaatgggagtttagctatctggcggtggcaagtaattatttttctggtcagtaactttgaactgaggaacagatgtgaatcaaacatgaatggattataatctaaagtaacggatacaacttttttttacctgcacttgtgacgaagcacagatgcacgctgcctgtaagcttctgagtgatttggttcaacctccagcacagcatttagcagaccaagtgatccatcatatttccttaggttcatcatttctaaggctcgtttgaacaaagtagagggatcattatcttggccttctgaaaaaatgaggggaaaaaggatacttagtctaccaggaagcataaaggaaacatccattttgtgtagacgtagtgctgattggaatgaaaagaaacttaggacattgctgatccatgaaattaatatgctgaatagaaaatttaggatggagtggttccgttaaatttcatgagatgaacccatgatggagcagttaataggatccaaggctggctctagatccaaatatcttgtgttagaaacgatccaatggtatcgcagatggatgcagagcactgaggtggtcgaatgagatgacgagtctcgcgttcatcttatctgtatgatggatgattcacttccaatatttgccatttgggggtggtggggcgaagaggaagcgccgccccacaagagagagaagacgggggtcgcagtaccttgagcgaagacgaagaagacgggggaggagtgaaggagaagcagcggcagcagcaccctccacggccaccgcgccatcgccaccatgctctcttagttctgcctgctaaattagactcaaattttcaagcaaatcttgttgaaaacttcttataagaatataccttgataaaaagatattgtgtgtgactactcttcttaagaaatttttatgtgagttactgagtttggataagtacaaattatatgagcttacatttttctttctaatgcaactattctaagggtttgtggatgatattcagtaaccaaattacatccgctaaaaacaaaaatcaaaattaacaagttgaaagtaggtggaactgagcagaggcagatctaaccctgtttcggttgaaccagggataacgcttaacgcagaatagctgatgaggtgtgggtagggaaggatgctcaccggcgagcgacgatgcggtggaagcaggaggacgccgggcgccacctctgctcgcggcggaagcggcgggcgaggaggcgaaatccgaggccgaggccgaggccggatgggatggattaggatgctcaccggtgagcgaatgcggcgggagcaggaggacgccggcgccacctcagctggcaggatggagatcggcggcggccggcgggcgaggagacggccgggacggattggggaggcggaggtcgtcgcctgcctatgggtcatatgcacaggcccatgaggctggaatttttcatctcccaaaaaagttcatctaaggttccctaacttcttgttgagtttaaaaggccatgaaacctctaatcctgtaaaaccggatcggatcacttttgatcccaaggtagtattgcttttcggttttgttgatgtggtggctgagtcccacgtggaccccacaagttaaccggcaatcttcttccacttcactcccctcctcccatctcaacccaaacctcctgggcatccgccaatgggtggggagaagggtgtcggtcggcgaggaaaagctcgacggccgggagcgctcacatcatggacttgcgcacgcagggggggtgcggcgcgggtcccaaccacaactgcaatgtcgtcttcacctgcacgcgtgagtgatgaggcttctacctcatcacgctgtccaagctcctatcccccaagctcatagtcaccccctgtcgagctgctcaaaagccgatgtgttcaggtgtccccgagctccgcctctcgtccgtagaggcgcacgtgcggttccgccgcatcgtcttcgaggtcaactccacttgcaccacattgtggtcgcatcgtcctcgacacatgcacccttctccccgcctctcgccactgccaagcttcttattggctgctagccttctccctgtccccttctctctacaattttgtggttagcttcttattactagttgctgcttgtgttattgtaggctcacttgtgacgaatccgtttttttacaaagtactatattggtccaaacatgagacttgcttccgcttatcacatttctatgtaattgtagtgtcattacagtagcggatgtgaacctcatttctatatatttcttaaaaaaactaatggtagtgtcagtaaatttactgccccacctactctaacagtagattttataaagcatccttagaactttttaatatttaaaataattgaattctaacatacaaccacgtataaaatcaaaagttgaatatttccaatagcaaatgatgaataacatattttataaaaagtatatttatatatttatttatatccatggtagagtacatttgtttagcaagtagttaaagttttaaattcgccaatttcactatatctaagccataattgatccttcactagggatttaaaaaagtcaaaactgagaatttcattaaatggaaaatattcattctggtagcaattatgtatattagcttggatacatgataaaagattaccttaaactaaggttttcggtggcttttgcatgatttgggattatttgtgacaacctcctaatgactcctaatgagtaaattttataaaactacatttgatcaaattattgtaaaactacgtacatattgaaatatgtgtatcacaaaactataaatttagcttcaattttataaaatgaaatatatatttcaaacatgaaaactaccttaaatggtgttaaatctattattttataatacatatttttaaatctatattgtaaattaatggtactctacaaattgtactccctccataaaaaaagaaatctagaacactacaatgaatcagatgaatatatagattcatagtattagaatatatcacatctagtattaggctgattttttatgggacggaggtttgttgggaaacacaaccaaaatgatcagcgacgactgagggtgtgtttagtttacgtcaaaattggaagttttgttgaaattggaacgatgtaatagaaaagttggaagtttatgtgtgtaggaaagttttgatgtgatggaaaagttggaagttcgaagaaaaaatttggagaaaaatgcctgtgtgaagtgcacacgcccctcgccgcggccagcttccgttgctgcgattttgacagggacaatgccggcgtcgtaatccgacgacgagcggtagctccggcgtgcaagcaagcggcgctcactgctagtgtcacggggatggccggaaatggatttgttggatctcgaatggatggatggatgcatcaatggtggcttggctttcatgtcgctccttgtcgttgctgctctttgggtgcaagaaatcccacaagccgtcgctctcatcctacccgatgattgatgcgtatttcttgccccctttccgcttatccgcccacgaaaagggcgccgatttctactcctcttctccccaagaatcactggctcagtggttagtggtgactagtcatcggactcggagggagtgatctgtccgaggggataaggagggcttcgtgttcttgaaattcagttgttgcggcttgctttccgtgcaattcttggttgagatcgcccaatcattgggggcataaatggaggtggaattcttggaggattccattgatttgatgcgtctggtagtgtggtggtgttcttgagtcttgattagtgaggagggagtggttcttggcgggaatggcggcggcggcggttggggtcgtggtggtggtggtggtgttcttggccgccgccgtcgatggcgtcgcggggaaggactgcacgaacgggttcccggggctgacggcgtcgcacacggagcgcgcggccgcggcggcggagcagcggccggacggcgaggtcgaggcggcgcgggtgctcgatctcctcctcccccacggccacggccacggcgacgaccacgacggcgaccgccacctcacccccaccgacgagtccacctggatgtctctcatgccgcggaggctcctcgcgagccccgtctcttccccgcggcgcgacgcgttcgactggctcatgctctaccgcaacctccggggctccggctccggcgccggcgccatcgccgcgagcggcggcgcgctcctggcggaggcgtcgctgcacgacgtgcggctgcagccgggcaccgtgtactggcaggcccagcagaccaacctggagtacctgctcctcctcgacgtcgaccgcctcgtgtggagcttccgcacgcaggccggccttccggcgtccggggcgccctacggcgggtgggagggccccggcgtcgagctccggggacacttcgtcggtgcgccaccgccatttctcggcatcacttgcacagcgaaatcgcgcaattggtctgaatttgcggtggctttgctttgctgcctgttctttgcaggacactacctgagtgctactgccaagatgtgggcgagcacacacaatgacactctcctggcgaagatgtcatcggtcgtcgacgcgctccatgattgccagaagaagatgggatcggggtacttgtcggccttcccctcggagttcttcgacagggttgagtccatcaaggctgtttgggctccttactatacaattcacaaggtatatgggggaatttcagttcctagtgttgcttgatcactatattatatcattgtcttgctacatgagtgcaattcttggtttgcagattatgcaaggtcttcttgatcagtatacggtggccgggaattctaaggcccttgatttggtggtcgggatggccaattacttcagtgaccgtgtgaagaatgtcatacagaaatacagtattgagaggcattgggcttcactcaatgaggagagtggtgggatgaatgatgtgctctatcagctctacacgataacggtgattgtcggtttgttatgagataggaatactgccttgattaatgcaattttctctagtggagttgctaacttttctagttttcttgcatgtgcagaatgatcagaagcatctgactctggcccatctttttgataagccatgttttcttgggttgcttgcagttcaggtctgctgatttattttcttacctgcttttgttcttatattctgtatcatctatgaacatgtgtcaatttatggtgaatgactcagaccaacttacattcaacttcaaccttgtttgtcatatagcaatttacctgttttactaactgtcaaaaattatggattacctaatatccagttttgagttggcacttggcagtttgaaaatcaatataactacatgtttgcgtgccaaatggatctattatttcaattctactgttcattttgtcattatatttttcccactatagcaaagacactacctaaaatgaagtttagaacttttggcttgggtgtctgattccagaggatacaagaatagtagtattcctattgcagtaatgtctctgactgataaatcttgagtgtgcttcaattcaggccgacagtatttcaggcttccattccaatacacacattccagttgttattggtgcacagatgagatatgaagttactggtgatcttctttacaaggtaaaagaacacaaacctttctttctggatatttactccatatgcatacatgaagatgaattatctgtccagggatatggatatgaatgtacaatgctaatagtttagattatcatattggttacttttttttagtggtcatattggctgcttggctgaaaggaaaaggatagctttattctgcttacagattatgcatatttcctgctgatattggtaaatttccagatatgggcctggaagtgtgatagcataatccggggaaaatagtatatttcttgctaacccatgctttctctaggtaaactatagtttttgggcagtattatacctttcattacctattagctctgtagttatccatatgcagtccctttttttgtcagctgtatgtcaaagccatgtgttggttttttactggagtttttttatgctgttttttactggagttatactatctgtttttctttctaattcttttcactaacatcatttgagagaaaagctgattgtaatcataattctcatgaaacagcaaattgcaacgtttttcatggataccatcaattcttctcatagctatgctactgggggcacatctgctggtgaattttggtaattttactctagattctgaattcatagtcaatagtatatttctctttgatgtatgactatctacttctatataattattcaggaccaatccaaagcgtttagctgatactctgagtactgagaatgaggaatcttgcacaacctacaacatgctcaaggttcacaatatcaaaccactctcctgaacattcaatctctctctctctctctctctcaatgggttcaatgcaatctactgcaggtttctcgcaacctattcagatggacaaaggaattatcatatgcagactattatgaaagggcactgataaatggtgttttaagcatccaaagagggactgatcccggggtgatgatttacatgctacctcaggcccctggacggtctaaagcggtttcctatcatggttggggaacaaagtatgactccttctggtgttgttatgggacaggtaaataaaatgcttctgagttctgcttatttaacactgctgcttttacatgaaaatattgcggtaacagtttgtcaaattaataccgtgattttagtattactttgcttgtgttttcattcgaagttgtgaaaatttgaattgaaaggcaatttatcaggtggcctgtttctttatggatcttctatttcatttacagggatagaatccttttcgaaacttggcgattccatttacttcgaggagaaaggagatagaccggtgctaaacatcattcagtacataccaagtgcttataactggaaagcagctgggcttactgttaatcaacaactaaagccaatcagctctttggacatgtttcttcaagtttcactctccacttctgcaaaggtaatttcttttaatgtatgttacatgaaaatcagatgaaagaagcagcagttagcttcctctattctacttatgcagacaaatggtcagtctgccacattgaatgtgagaataccatcatggacatctgccaatggcgcaaaagcaactctaaatgacaacgatttaggattaatgtctccaggtacaatcttttgagtgcatgaacaaaaaaatatatccatttcaatcgtccttgatcatgttttagacaagttcttactttattgttttgtgggcagggtctttcctttcaatctccaaacagtggaactcagatgatcatttatcactacagttccctattacactaaggactgaagcaataaaaggtcaaaactcaacttttaggaaatttcttctgttttcaagtatgcatcaatgtgttcagatgatcatttatcactacagttccctattacactaaggactgaagcaataaaaggtcaaaactcaacttttaggaaatttcttctattttcaagtatgcatcaatgtgttttgcttagttcacatacaattgtttgacatttcaaccgaaaattatcaattaacataaaaaatcataagctaatagtgaatatgaaactgtgacgatgtgacatacaccaactattgtgatttattttagtcagaatattcatctcaatgttaactgctatgctgtgacatcagatgatcggccagaatatgcatctcttcaagcaatcctattcgggccatttgttctagctggcctgtcaactggtgattggaatgcagaagccggcaacaccagcgcaatttcagactggatatctccagtcccttcatcctacaactcacagctggtgaccttcacacaagaatccagtgggaagaccttcgtcctctcgagcgcgaatggctctctcacaatgcaagaacggccgacggtcgatggcactgataccgccatccacgcaacattcagagtacaccctcaggactcagcagggcagcttgacacccagggtgcaaccttgaaggggacctctgtgcagatagaaccatttgacctcccaggaacggtgatcaccaacaaccttacccaatccgcgcaaaagagttcagattccctcttcaacattgtacctgggctagatggaaacccaaactcggtctccctcgagctcgggaccaaaccgggatgcttcctggtgataggcgtggattactccgtgggtacaaagattcaggtcagttgcaagagttctcttccaagcatcaacgggattttcgagcaggccgcgagctttgtgcaggctgctccattgaggcagtaccatcctatcagcttcattgcaaagggggtgaagaggaacttcctgcttgaaccattgtacagcctgagagacgaattctacacggtttacttcaaccttggggcttgaaccttgaaagaggttactcattagtagaaagaatcaagaattcagaataatggttgtccttactatactgtaatttagaatatgcagccaaagaggaaacgttttgtttcttctgaaattgtaggataatttttactgagttcagtgcaatgttgtgcaattatgagttttttttctgtggcattttcgtatcttggtaattgaaaatgctgctgaaagcctgaaatacagccattctgcaacatatatgatgcagtagatgctacttcctctgtttcatattctaagtcattttagatttgtcctaactcaaacatttctaagtttaaccgagtttatagaaaaaattacaacactaaattagttccactaaatttattattgaatatgtttttatagtatatttttaattttgtgttgaaaatattgctatattttttttataaatttgatcaaacttgaaaaggtttaacttaggataaatttataatataaaacagaggaagtatcatttatctccattgttctggcttttgtccggtaaacacaagagggaaaaaaatcatctgttcttatcaggattgcgtgatatacactataatggcattagtataacaatataagatcagagcaggtaacagcagtttaagtctcataaaatacatctccagcgactgagaggacgacaaactggagattctatccaattcaataaactactgaggaatctcagctgatcagagctcaccattagtgcctgcattgtttaatgcatttcggcttaacacccggcaaaggagttgatcaatgtacccatcatgcctaaagaaacccacccaaccacaatggcacaaatcaagggggaaaagaagtcatcctctgcaaagaattttttggcacaacttggtttattctgcaatccatagtcatgccaatccatagtcatgccaatcaagtgatataacaaaatgtaagcatctgtgaaattatccacctaaggatttcaattggataatataaggggggcagaatttggtagcagatgtcagaatctgtgaaattatcaatcgaatcagaactgcagctgccttgcaccaggaaattaatcgaacaaaatggttatcttcgtgacaacaatatgtatgctggttcagatcacaagttaatagatgtttgaactttaaggcagattattaactacatcccagattactgaaacagaacagcttcacatgctgaactttcagtgttacatgttgcagatctaatcccaactattctcagtagcattaaagaatgaccatttggggatagagtaataacctgagaactaacttgtcatttgtcacaatttcctctcagatccgattttcaatctagagtagacccagccaaccaagcacaatccggcaaacttctttgaacatacatgaatttgaatgcgcaccagataaaggtgcatacataaataatctttaaggaaaaatgaataatggacatgttggcaatatgatggaccattgctgataactattactgattgaaatgtagcaagcatgggacatagtacatcacagagctagctaaatgagacaccacaatactgaccgaaaaccaccaagaataaagattacacaacatacccaacacgcaaaccacttgacttgactgagaggatgaattctttcggctgccaggatgcagtgtgcatcacaaagttgaacaatttaagaaatgtagcagccgacaagaagaagtgtgaggatagagcagcaaaggtggatgttgaaatcttgtaggttgcaatccattccacgcccctagccgccttagatcttgtcgagcttctcagccttcaccactgggttggccttggcgatggcatccctagccgcagtccggtagtcgaactggcattcatgcttgtcggagtagcggtgcaacgcacagtacatgttaccgcaccggcagttgaatcccgtcagcccaaccctcttcctacaggtagcgcaccggttcggcccttccttgaccttggggactacagcaacctcctcgctggtgcccgcgacatcggtaggctgcacaacgagcgtcttcgcctcgacctgagccaccgccaccgccgtgctaccactggcagcaacaatatgctccttcccaccgtcacaaccattgacaatgctatcgatggaggaggcagcaagcttggcctgctcctccttcatgatcatctccttgtggcacttggagcacatgttcatggtcgccgcgctgccaaagaagccgcagttattgatgcaaaggattgggccctcgggctgctggcagccagcctccttgtgttccatcgcaactgtgatctgttcatcaaacaaacaatgcaaaactcaataccgaaatgcgtataagaaacaaatttaaaatttaacatacggataaatcaactagtgtccaattaaatcgggcggtaagataatccaagaagcacctagttgctacaattttcctatcgaaatttccatataattgtgacttttaaaataacctataacccactgcggcgagcttacactttatgaaacaagatcctaatttctatgaggcgcaacgaaatcgccatcacaaaagtggattcctcatcttatcaaccaaacgcgcctatccatttcgacgaaatcaaattcaaacaccgtaaatctgctgtaacacgttttacccactcacatttaccccgagtaatgattaatcgcccacggttctacaacaaatcaaccccaaaaaaagatcaggaaactcacgcgaatctaatcatttcaacctgaaagatcacatagcctaatacacaaccgaaaaaaaaaatcaaacataaacgctttcccctcgagcccaataaccaataaccaaccacatcaaataccaaatcaaacaacgaccccccacatcagatccccgcaccaacccaaaaccgatcccccctccccaacaccagcaccacgcggatcgatcgatcgaatcgaatcgaccccaagaaaaaaacaaaaaaaagaaaaagaagcccacagatcaaacgggtcacccacaaactcaagggggggggtggaatcaggcagggggagcaagagggcaaaccctaaccctggtcgcggcggcggcggaggccgaggcggcggtggcggaggaggcgtgcggggattggaatcgcgagctcggtgcgcgtggtggcgtctcctctctctctctctctctctctctcactctctctcttcaggggaaggtgggggtggggggagagagagacactgataaaaaagaaagcccccgatggcgacggggaaattaccggtttgcccctcgcctcgacgtgtatttacgccacgtggtggggttgtgggccgttggatcgtggttggacggatgggaatcggagggagggtgtggggttttgcggttgggtccctgggagatgtggggttataaaaagtaggggctttttctttcttgctggggaagaagatggaggagagggagagcgtgtcccttttccttctctttattgttggtgtgatacttgtgtttaattattaaatcctttcttattatagtgctggaatttagtttttttctattgcagtaatactgtgaaataatatgaaccggtataaaataaaaagataacgtgttcatatgataatcgtataaattgttgctaacttttgtagatgaaaagaacaacatgttcataaccattccctataaaatcatattgccttataaatgaaacatataggttgtcctagatataaaacaatttttgcctgcttgacactcttgtgttcatgaaaattattttttttaatacacaaaagagttgcgcacctatgtattaagaacaataaaatttataagcggagccaaataaaaagaagaagagagccacatgtggagtagatgaaaaactagaggaccataaacctattctcatggtaagcaagagacgacctattgtgacatagcactctaccttattgcgtcatgtatataccttatcatgtacaaaacaataaaaataaagaatatggtcagaccaacttgcttttaactatggatgattggtagtattgatataggggtaagaatacatttttaggatttagttcaatcataagggtttggattaagtcgttgatttcgtaccagctaattaggtatgctaggtataaacatttggcatagcatacatgcacttagtaatataggtgctcaatgaaaagagaaaattgacatttagccatcgtcaggatggggtttcgccagaatgccactcccaaaagtggtttcgttaaaatgccatcctcaaacaggggcaacatgttgtaatgccattttatccatttcttctcaatttaatgatttttgtagtgttttttcttgctgagatgactaaaataccctttatcctatctcatctctctcttcttcctctccgttgcatatacacagcacggctcgatggcgtggctgtggacggggacgacgccagctaagctggggacggggacggggaaggggacgacgccggcgtgggtggggaaggctgcccccaacctccggcgcgtgcgccagccaccgcgatcgaagacggcgacggcggcgagcctgacctggacctccatggtaccaacgcccccgcccttgagcggcgcggcgtcgtcgggacccacgtatgcgccatccacctcgaggcggaaggcgagcgtggtgatgttccgcggcggctgcgcgaagggcgggagcgtggcgacggcgatgggggaggacggggcgagggagacggaggcgagcggggagaagcgatgggggaggacggggcgagggagacggaggcgagcggggagaagtaggtgacagtgagcttggagtttgggttgtcggcgaggagggaggcgtcgatccgtccccagccgcgccggtgccagggcagggatccatctcctccacgcaagtcaactaaatggtcacaggggcaattttgtcacaccacggtggaaatcatttgcaaatcagctaatttggtcgaaatggcaaagtagcaatgtggcgtcgttcgaaaatggcattataacgaagccacaatccggagtggcattctggcgaaaccccatcctgacgatggctaaatgtcaattttctccaatgaaaagggatcatctgacttaactgttgtgtaattgagccactgacacatggaaagagactcacatgtcagcatatgtactttctccttgtctttttcttaaccaacgcttgtaagatcttgtattgtactccctccgtcccataatataagtgattttgagtttttacttatacggtttgaccactcgtcttattaaaaaaaattggaatcattatttacttttttgtgacttactttattatccaaaatactttacacataacttttcgttttttatatttgcataaattatttgaataagacgagtggtcaaacactacaagcaaaaactcaaaatcccttatattatgggacggagagagtagtattcatcaaaacgttagatacccgggtgaactaatatatgttggtatgagtcatttcagcatactcctgtgagaagcagcaaatggacaattacatgtatgagagtatctgataaattttatgatccttgcatatatagaacctgaaatatgcaccatttattccattctattttgcaaagaagaatgtgtaaacggtatcagagctcgaaaattttcacgcatagggctaaactaatgaagagctattttttcacgaataatatagcatttttttaaaaaatataataagaattacggagcgatttcagcctaaacaaataagagctatttttttcacaaattatatagcatttttttaaaaatataataaggattacggagctaggtatagggtttcaaccctagttgctccatgtttgttttccgccccagtgcgcagataattgttacctagctctacatattttgtttaaatagcatagagtatagagcagatgatggacacaagtcgtctgcagtactgcaggctgacatgtgggcccacagccctcgggcccacatgtcagcctgaagtaccgcacatgctctgcaggggatctcaattgagcagatgatattgatctcttaggtctaaatttcataagtaaactatttataaggtattgtttgagttgttgataaaacctaactaacaagctttaatacgtagagaaaaagaagattcctacaacattgtactccctccgtccctaatataaggattttaactttttgcctgtactgtttgaccattcgtcttatttaaaaaaatttagaattattatttattttatttgtgacttactttattatccaaagtattttaagtataacttttcgtttttatatttgcacaattttttttaaataagacgagtggttgaacagtgcacacaaaatatcaaaatcccttatattatgggatggagggagtactgtcttaaccaaattcctcatgttatttcccatcttcgtctactgtggaggagctctaactcattactcatccgttataattatcattttctttaggacaaaactcggtttagtatgtaacatttgatatactacccggtcgaaccgtaccaagctttcttgtaacatatatgatggtgttggagatctctagccaatcttatgccacatcgcatatatttcttttaactatgtatgtgccctaaataaacttagacatttattcgagccctagttttaaagacaaattctatctacccaaattgtaccgattctacccagcacacatgctaaaggaattttgcaaaattatgtatgctcgtgtggctgatctctcctctctactacacatccattgtataaaaacgagatttgaagggagagatacccctctaaacttttttttgtaaaatgaattgataaacatgtcaaaaattaaacacgagattttaaaatggaaaccacacgctctttacaactgcaccgtgaagtgatctctcacctccggtgtacaagcattttccatcgaaccctccatccccatggcgggtggttcattcgacgagacgccgccaacgccaaatcccggcgcgaaccaaaaagcgcgggaaaaatttccccgcacccgcgccatctccacctataaagatctcgccgccgcagccgccttctcctctacactactagtcctcttcaccccgccgcttccaccagatgggccgcaagaggagggctagggtttcccgcgacggcgacggcgaggaggaggaggagcccgcgccggtcgccgcagagagcaagagcctctacgaggtaaatccccaactccaaaccctaggtctatggcttacgaggtgttacccgtacgggtagcggttgattttgcggcggggtggtgttggtctgatcgaatcgtgtgctggatgcctggatcgatgtttttttgttctttttcttttttttccgggattcgagggtgaggagcgcatctgattgttcgatgcgatagcgggatagctttcgttttcttgtttatccggtgtcgcgtcaggttccgcccgttggggaatttcgtggttcgctgcgcggattgatcgtgtgttagtactagtgtacaagtataacccatatttgcataccagattacctcgaattgaagcaactgtgtgtaccatttcaatgtgcaaaaacaattgggcaagattatgctactgatgaacccaaagtacgaagtgcgtacttatgcaataggaaaaacattttgtatcccaaacatggaggcagttgcttgaaggctcacatttcacttgtgaagccttatgactgatatgggagagtgcttattggtttggccttaactttcagctctagttttgggcttcgcagtagtagtacctctccaaggattttatagtgacttaatcttctttaaatcttgctggccttcctgccaattgctctttgatggtatggcattcttgcctttgagctatacctgttcctcttaagtattactgccacagaatttatgaaggtcaactgatgtttaaatctaatttttatcatgttctggaatctggagtaaatgtcaaacaatcaaacagttacgtggctgggtgtgatagggcctctaactctctactatgcacatacattgaggacatagttcaatccttgctagcttgtctcgttaaaaatttatattgtcaaataaaaagggtttctcatatcatctgatcaatcagaaaacaccaatgactgggtaaagtgtgcaagagccaagaggtacaagaggttgtgattggcggttgatctcaagctataccactattagttttaaaagcaagtacaatagcattaccttacttgcataacttaattcaataaaccttatatatgtcccagctgttcagacatcagtattttttttttgtcttgatctgtgctgaaaaattgtaattaattggcgcacactactagactgtttagcgcgttttaaaaaaattctagactgaaggaaatgttgctgaaacctaagcttaatgaagtgccaaagaagagctgaaagagttcatggaaattcatgtaattgactttaaaaaggccacaaatcataagattgcaaccagaaacagtggctcctataggctgagctagctgcaagcctgcaacttaagagccccatcggttggcctaataagccaaagcaaaagccaaaatttgaattttcgaacttgattttaagatattttcaatgtagtttcttttagtgttggattttaagttgctatgaacaaatatataaaagttttacctataaattaatttttatatggcttattagagaatatgggcaaccaatgagacttattgtgctgctacctccctagcagtgacccctagcaaagggcattgctggcttcctgcagcagttgtctgtggtgcaggtgcagctagctcagtggaatcggcctaaattatttatttttaagcgaagctgtagaaaggaacctaaagtacatatgcaatcagaaacaattgttatgcttcagttttgtctttctttataacacaagtaactcatttgatgtttcctttcttcattctgaagatcttaggggttgagaggacagcttcacagcaggaaataaagaaggcttatcacaagttggccttacgtcttcatccagacaagaatcctggagatgaggtaggatcttgtttccaaattttttccatggattaagtgccatttgtctcaattgagctgttatgtgatgtcaggaagccaaggagaaatttcagcagcttcagaaggtgatatctattcttggggatgaggagaaaagggcattatatgatgagactggaattgctgatgatgatgtgagcacctgattccaagtagtgtgatttccaacctttcactcccagtagattttctgaagttttgtcttttcctgtaggcactggttggagaagctgcagacaatcttcaagagtacttcagagctgtttacaaaaaggtatctttttggtccatatcaacaaaaaaacttgtgctatctgttcacctatacaatgatcggtgatgacctacacttctgcaggttactgaggctgatattgaagaatttgaagctaagtacagagggtcagattctgaaaaaaaggacttgaaggatctatatacaaaatttaaaggcaacatgaacaggtggcttacaaaatttagtgttgattaattttctatacagaaggcaatgaattgcaagtgaataattgggttccatttctattttaatttggtgcccttgtatgcaggcttttttgttcaatgatttgctcagatccaaagcttgattcccatcgctttaaagatataattgatgaggcaattgctgaaggtaaatgattatatgctgttgccatataattttatcatataatattgaatacctttttctattccttttctacaatgaagcgctggcaaagtgtttagcttatcatgctaactcaatctattccctgaaacttctctaatggttaaactcctttccatttccttcccttttgtaggtgagctgaagtcaacaaaagcatatgataaatgggccaagaagatctccgagattgaacctcccacaaacccattagagagaagagtgaagtaagctctcattctcttatctcccaagtaatccgccttccgagatgttgtctaccatcagttgctcactactgcatttgcctcaaacctcgtcacaggaagaacaagaagaagagcgaggagaacgatctgatcctcgcgatctcacagcgcagggcgcagcggaaggaccggttcgactcggtgctctcatccatcatgtccaaatgtgacccaaaggggagcagcagctcggagcccacggaagaggagtttgagcaagctcgtcagaggctcgagaaaaagcgttccaagaaccgcaaatgattcgccttgcagcctcccttgtggcttgtgcaattctgtttcatcgagtttgttaaccaggcctatctttgacagatcagattgtctgatattctgatccctagtatctatgtgagattggctgcttctgttgtggtgcaagttcaggctggaatctgaacttcctgctcttttgctgaaactggggccgatctttagcatcactgcatatgtgtataatcaaaatcttaaatgtttcctggatgtgaacttgtgatctagtttctgtataagttaatccagtagctgtcttgagtttttacgcctgtaaacgatataaacaagaatgcatcatcaacagggacgagaggcgggtttgcaatctcgttttggggttgaattgtgaggcacagcactattttcactaaattctgatgaaatttcaaacggaactattcataaaactgaatggtttgggaagctcgaataaaattcgcatgaacaatcttgataaaaactggttggtttttgcgaaattttctgtgatttcgagataggctagaaatcatatttttgagaagggggggggggggggttcgaatggtatttgaaaattttagggtttaaacagcaaaattcgattgaaatttggcaaacgccattagattagaacttcatcgagcaatcacctccactaatcaccaccacccctatcttggcaaacccactaatcaccacccccatttttggcgaagctccaccccgagcttcgctcatggccgctcgccccgccattaaaatcccccgcgcgcctcgcctcgcctcgcagctcaacgccaccaccgcgcgcctgcagcccgagaagccgtcgatcgacaacatcacccgtctcctcccccaccccgcagagcccagcacttcgccgccgccgcccgggatggagatgaagaagatcgcctgcgccgtgctgctcgccgtggcggcgtccgcctccgcggtcgaggcctccgagtccccggcgtccgcgccgggccccgggtccgccagcggcgccaccgccgtcgcggccgcgcccgccgccgccgccgccgtcgtgctctccttcctcgcctactgcctgcattgatgacgaggagagagagagtgagagagagggtgtctcacgtgggagaaggcggcgcggctggtttatttgtgtttttttttaaaaatatatgatctaattcgttggctaatttgattgtttttggtttatattttaaatctacgtgtttgtgaattgtggttgaatatatatatatatatatatatatatatatatatatatatatatatatatatatatatatatatatatatatatatatatatatatatcatgttgcttaatttgttttctgacgttgtacctgctcaaatccacacttgtaagcttgtaaccgttattttatggcaatttaaatatagcatatgaattgatttgttcctttttaattgttttttttgtttaaaatacattcagatcgttatagatttatcgaaaacggtaaacatctttaacacaagtcgttttgtggcatggagaaccatctgccgctcaagcttatagaatggacgcaggagtaggtgggtggatggcatgattcatgtggctggctattgtattagcccaactacattgtttcagttagcttttatgaaactgataaataatattgatattactactccctccgagttgataatatttgtcgttttaaaaatatagtctaagaaacatatttgaccactattttctattataatatatatagaaatatcacaaatatataattttattgaagtacatttttaaaactaatatatacatatagttttcatatttctaagataaatattttataaattatttatagtcaaagatttgaaggtttgactttactctgcttcaaaatgataagtattaccagttcgaatggagtatagtacattgtttctccttaaaaaatctacatcatgttatccgcgtcacattactaaaatcataaagagatgtgacacttcataatactacgaatctagactaagagacggttcagattcgtaatactagaaaatatattcctccagaatcgcttatattatgggacggacgtaacatatagaagttgatttagaatattaaaactcaactaatcaatcacatggtaatgactttttcttttgtttttggtggcttaacttcatctcaaccaaatctaaattcgacctgctatatctgctcatccagttagatctcgaccgtcgaatctgcacgatccacgatatcaaattcgcgatatatatatttttttaaaaaatacaaaattccaagaacacaagttgccaatatgccctgacaaagacaacaaaaaaaagaacagaagaaaaaaaaaattaccaagacaaaattcccctatctattgactaacccaaacccaaagcacataagcatgtgattagcaaaagacgccgtactctctctctcatcaaactgctgacgtacgcacgccgtgagacgccgccgcagcaaaagcttcccttcccccatctccctctcctctcctctcctccccgcctccccccgcctcgataccctgcaagccctagctctctctcgccgccaatggagtcgcaggtgctggtggcgctcgccctctcgctcgtcggcggcctcagcacgtccatcggtatggccccgccccctcgcgcctcttcccctctcaacagtttcgtttcgggggtttggatgctgctctgcctgcggtcgggcgcggtttcctagggttccgcgggtggatttaaggccgttttgtgtagcttgcgggctcgctgcttgaaggaatcgccaagtggctgagcatctcgcaatctcgcgttcctgggaatttctgtgtttctggtgagtttcaggtgtcgatagcgaattctgtcttgctaccgctcgtataggtgacttccatgcgaattcagatgcatcctttattagcaaatcgaaaattagtgtttaggatttttgttaagaaagagagttcagaatccagtgagtatctcccttttgtaccattttggcttgtgagtgatgaatgttttgctatttaggcctctgaatatgaaaattaattgatcacaatgattcatcagatttttttgttttaaggtcagcaatggggtgttgtaatttgtaaataagtggcataactggacaggtttagtggcagggtgtggttttctcttatgtgtactatgtataacaggataagtaataaatgtcgttgcatggtcaaaaacttttaacccctagggttcaacattgtacttccttatgtttggttaacaatttgcgaccgtgaatgatctcaggacattgagcgatgagtactctcttttaaaactgtccctaatactatgtggagggtttccagcaaggcttctttgtgccattttcccactttagaagctccaattttctgtttttcaggtgcgctgtttgtgattttgaatccgacgcctaatcttaagatgcttgggcttctacaggtgataagctttgttctctatagtaatggagcaacttcactatcttttaagcaagttctggttttgctattggttcttggtagattgatctcttgctgttactgaatacagggttttgccgctggacttatgttgagcatttcctttctagatttggcacacaatgcattgaattctattggtttcttgaagggcaacctttgggtcagtcatgctttgcctatacttatagtatccatgccaatgtaatgccgatctatctcatacaataagcagcaaccattgttaactaataataatattttgcagttttttgctggagttcttttctttggtttggttgtcaagtttattccagagccaactgttgtgccaacagctgatgcaggcaagaagcaggttgaaataagcagccttaataatgttttcacaatcatattagtctgttttcaaataccaaggctgaacagaatttagttctctatgtttggtttgaggaaagcagactgacgatgatggttcgggtaaagatatgatgaaaaaacatcgtcggcaagtattattcagtgggatcattactgctgttggtaagaaaataagacttctgtatcactaagcatacaaccagacatgcattcctattgaacttacaccaggccattattcaaactgtttcttgatatatgttgtgtggctttgcttccttgttccttgagatactacaacaatctgatttgatacttattatgagcctgcaggaatcagcttgcataactttccggaggggatggcagtatttttgggatccatgaaggtattgcttttgtatattcatcattccaatatagtggcatcattcatctgttgaagggatctgtaacttgcatttttttcatctaatagaagttacttgggaccaaccacctttcaaagcctttactagctctggtctataacactatataacatagttttggtgttccaatagttactgtatttgagtagttggcttggcctagttgctagttgtatttaatatcattctgtgtcccaatagatatcatgttggatatttgttagcttgccctgaatgtgttttgttatgatgaaaaactgcagggccttcgtgtgggactgaacttggctattgctattgctttacacaatataccagaggtagataaatcaacttatcagcatttctggtccatgagaattcttaactacagtttgatgttgcatattgctaattaggataccctagcttgttgtatgtgcttgcagaaagatttgaatgccatctaaagtttgcctcttagaaaatatctggtatttcatttatcagtttaatatgaatcgccaacgttatggcaaactaaatcatgacaaggaaaaaaaaatctcaagtttggttaattatatatgcccttaagctgcaacatttatgacattttctagatctcaacaagtcaatgtagctgtatctgaatcattgttgagtgtggcaggatagagtcttggacaacttcttttaacttctacagaacttggttcatttactgtagtatttatctgaagccctaattagttgttttttttttcaccttctcagggggttgctgtagctctaccactctattttgctaccaacaggtacctattttacccatgtagagaggaactgaattaagttatatggttcacagtagccttcagaaatgagttcattaaagaatatatgttatggctttgagattttctatagacaaaagagtgtactagttactggtaaaaaaagagtgtactagttactggtaaaaaaagagtgtactagttgaagtcatgaattgaggataggtgtgtaagatttgagaactagtcattggcgaaccactcttatctgctagtactacattccacctgttgcacttggaggattacagagcattaataatttctaatggttttgctttagcgaaaaggcaaatgatgcttaaccttttcaatttgcaataatagcatgtttctgatagttctcttgtaattttgtaacactttcttctaccacagtaattatatcttgttccttttttcacatgtcaaagcaaatggcaagcatttaaagttgcaaccctctctggtttcgctgagccactaggagtgatcattgttggtatgctatgtcatatgcacttctctgtaatatttttcttctggtgtatatccattgagtgctgaaggctgatgcaaatgtgattgcttcagcttacttgtttccgagcagcttaaatcctgaagttcttgaaggcctacttggttcaggtcagtctgttaataaaaagaaaaactggtatcagtattctgcattttgttgacctcccatgtgcctttctgcagttggtggggttatggccttcctcactttgcatgaaatgttacctctagcatttgactatgctggtcaaaaacaggctgtcaaagcagtctttgttggcatggccttcatgtctgcaaggtttgttgatgtttcaaataaagtactcctaatatgtttcagatcatccattgtgactaatgtggatttgcattcagtaaagattttcctttatattttttgatgcacttctaccctggaatataagtaacttaatgctcgcaagtgctgaattgctaaaacatcattgtcataaactcatcatcaaaattaaaatatatcaaatgaatagactgattaacttattgaccttgacactgaacagctagtcaatcttataccgcagcataccgtcacattgccttggagcggtacatatgctattcttacacaactaatctctggtttttgcattgtcagcttgtatttcttggagatcagcctgccaaaggaagtgagcttgtagcacatgactatccatacaagcttgtcacactatcctctgaactgaagcggagaacttaggagagatgttaactttctgagcactgccaggcagggatgtggggatatatggttcgccatttatcaaacggaaacaaggatttgtgacttagattcgcgcgttggccatgtgtatgctatcacagctggtcattgtatttgaccattttacagtgaagatgaacagtctgggatgggtggcaaaacaccacccagaatcagaatgtaacctccgcttgttggggaggaataggacacaacttgaactagcagactgatcagatcagtcctttaacttgaccagtgtacattggttgaaggcactgtgagaaaaataaaaataaaaatgcttcgttttcactgtcaagaactgtctttggtttgaacctttggccagacatgagtgaattatatagttccagaaaccttgatggtaatatatcataatcctgattgttttagttttaacttttgactagtctaaaatatgtactatcagaagtagctatattttgggatagagggagtagtttgaaagtattaaactaatataagtatttctccatgctgttacatttccatacttttctaaaaataaatttacaaaattcggcggcatcttattgattacgaagataataaatgtcatttttcactctagggccacacaaaaagatttcccttgatcagcagcaattttctcagacctgttgaaccgccgacacgaacaatcacacaactgcatcaacagcaaccacattactgtgcaacccatgtatcatgtcgtgtaagaatttaaaaccaactgtactaacttttttttttgttaaccagggttagattgcccagggataaccagatgcacaggttagagttaaatcctaggtttttttttttttgctttaactcaccactcgtcgaatgaccactttttatctatcatgatatatatcaaccacaacatcaatatccaacaattcacatgtttattagatgctcttttaacttgaaatcaaaaaaggaaaaaaacagagaagaatatatattaaagaaacacatctagattaacccataacaatgtagtataacataaagcaagctagcttaaagttccagcaaacttatatatgctatgcgaattaagattattggaaaataagaaaatttcaagcaactgagacctaacaaaactatatataacaataacatttctcgtctagttcttataagatgcatatgctctagtcaagaaaatatgttgctttggacaggcctaacgatttggagtatttttagtatatccgtaaaacccgacaaaaatttgatactgtgagaaaaatatgtatttgatatgtttgtttttcatacacccgatctaaatattaaaaaagatattgacattcaaaattttaaaagttctagtgtgccttacacatccaaaacggtaaaatcaatgttttgattgttattgtgatgaacaattgacatgagattttatttgtattggttttgatatatggtgatttattggcgaagtgattttgtctctgtatgggaccagacagtaggcaccggtcaaactgtaggcatggtggcggtcaaaccggccaaccagacggtttgattgactagctcctgtttggagttggtttggagttgattttttgattaacaatgattgcttcttgcttatggcttccagatgatttctatacgtatgttatatatactgttgtgtgataatattgagtcaagttggaaaagaactaatgcttgaatatggtttcttatttattcatatgtaagtgtgtcttgagatctcaggagagtattgccgatgatggatagggagtcaacttgagagaagttttgtctagatgatcaggagatcttgtggggtactaatcctagaggacaatgcatgtggtgatgaagattttgtatgtcatacaagaggtgttgtatgcatatggaaagcatagttaattttgaatggagtccaagtttgaaaagtttgaagtttaaatttgtaaaggatattgagttggatacttgtacaggtgagtttccgaatggattaggactacttactcatgttggatttgtggcttttgtgcagtcatctcaggatataaatagagaattgtcatgagaaaagttagggtttaacctagatttgagtttagtcgaaagttgagagaggagcgtttttgttgcactttataaacacaattagaagcaataaagttgatctacattcaaagaatttttctgatttatgttctctctattatgatggtcaggccagtagaggaacgacagtcagaccacgacggtgtgaccgaaggcatcttggtggttggaccaatggcatcaagtcaagaggaaacaacaataggagatcaggcagacgatagggaggcggttagactggtcaccggtggcataccgtcggtcaaaccaacagtatcaggtggtcagaacgacgctcaacgggcagtttgaccggagcaacttcttcgggttttaggatattttcttattaaaaaaatttggatttttatgttcctaccattgacgtccctcgctggtaagcttggttgttgtgttcgattaaaaaatgttttatggcctagtggattattttgttagacatgaatcgtgataacggtacattctacaagtccctttttcacatctcctcagtaattttctagaaattatgcaaaaccaagaaccagctagtgttgttattttatttaacaagtgtcttgcgagttattaagtactattgaatatatacaagccataacaaatggaacgaattgttacagagaagcaaattcgaggtaatggaattcattgattaattccggcgtttacttacaaccaatattccaaagtttgcacgactagctaccgatgtctaccataagctaaataaaatttcgcaatgctattatttcttgtggatctaaaacttcaaaaaaagcatctcaactttaattagctaagtttgaattatttcacaatatgcaataatcactatagtcatagcaatgtcaaacatagttcgaattaataaatctaacctcagttcaaaacccatgcatttaccataagcacactgtatatatatagtgtttaattaatataattaagatctcacacccaaactgcaaattgcatgcaatacacatcaaatcaaatcaaaccaaacaaaaaaacaattaagagagtcctccacatatatatatgatcgatcacaaacaaattaattttctactaaaaaaataacctgaaactaaccaataatcagctaattaatttcgcactcacatatatataaattaaggtcatcgcagcacaccggcggcggcggcggcggcgcggccgtcgtcttcggcgccggcgccggcgccggcgtgggcgtgggcggcgccgaaggcccgtgcgtggtcgttgagggagcgcttgtgtcggaagtgggcgccgcaggcgcagcgccagaggcggccgcagttcttctcgtgggtgcgccagtcgccgcggacggcgaagcgcttggcgcagcggcggcaggcgaagtcgcgggcgccgtggcggcggcggtagtgcgtctgcagggtgcggaagtccttgagcggccgcgcccgcgggtggtcgatgtggttgcggcaccccgccgcgcagcagtagcacggcagccggagcatcgccgtcggctgcgccccgcgcagcgccgccgtcccgcctcgccggtactgcgacccgtgcccccacatgtgcatctgcactcaccacgcaacgcaatttttcattcttaattttcagccagctgcccattgttcatcttctcttaattgcatgcatttgttttttttttctctataggttgcgtccatcaattgaatgatcaatagatacacgaaatcaacctttatttttcgattaattacatgcaagatacgcacaccaccacacacactatgtgagatattctctcgttgtttgtatatcacttaaatagttatataaaaattaacaagaattgagaatatatattaatgtgtgacatatcactctacaaaaatgtagcttaaaattcaatttctacatgtcatacaaaaaatcaaattaaattatagctagttaacatatattctcagttaatttttttttacacgtacaagttaaattttaagttacatatttatgaagtgatatatcacatgttaatatatcatcttatttttttataactatttaagtgcaacgaggggacgtctctcgagtttaaaattcactctccactatgacaagcattaattacacaaacacaccacgacgtaagcaagagcatgcacattcactaagacacattataatgactaatgataaacttcatcgattgttgggagtttcataagatagctgatcataactcataaatatgctcaattgctagaaatttattggtatatctttttatgaccatatagatcaaatggggatcggagtaggaatttaaaacacacttgtcatatactccattatttaagtatatatgtgttttttgcacgtataaatacctggaggttgttgtatctgttgaaggtcttgcggcagacggggcaggagaactgggtggcgccggcgaggatctgcgccgccgtcgggatccagtactgcccgccgccgccaccgccgccgctcctccgcacgctctccacctccacacccacgccggccatggcgccgccgccgccatcatctccagcaactcctgtactagaagcactagccccatggttcgccatcgccggcgacggcgacgccgacgccgacgagacggccggtaggcctatgcgcaaggcaaccgtgacctcctcctcctcttcctcctgctgtttgttgcagctgcagcaaccgtaccggagcagctgatgacgatcatggccgccatggccatcatcatcttgctgctgctgctgctgctgaccactgctgctgatgcaagaagaggtagatgaaatgaggctgaggaaagggaattccttcatgagctcgggttgatgatgatggccatggcctctcgagatcaggttggtttgggcgtagtcctccatggatggatggatggatggatcaatgcgagctaaggtagtagctagggtgcatgaagaattttgcagatgatgtgatgctgcaggggatatagctagctggggacgacgatgacgaaggggtattgtggatatcgtttgatttttataagatgtgggttggattaatttcacgtacggcctccagaaaatggagcttgacattatttgtaggacgaatcgaacgatgtcacttttaataatctaaatggtgagaatatatatactttcgttcgttctaaaatataaagacgcaactgataccaagaaataattattatcacctttttatttggatcaccctaataaataaattatgtacacacctaataaagttagagataagggtggaggatttaaacaaaccaatttaaacgagggaagctagttaactatatgtatatgcatatatgcacgtcttgtattataaaacatagaaaaaaaatagttgtgtcctaatattttgaaatggattatagagtaatatttttcagatgtatgtaaacagctagtacgactattatatatcttcttcatttccttgtacgtcctgcatgcatggttgcgtatatatgtagtgacgacaatatgtacggttagcataaagttaaaatataaagaattacatttaatgtaaagatagtagacatgattctttgaaggtattacatatgctaccatttatatatatatatatatatatatatatatatatatatatatatatatatatatatatatatatatatatatataatattacctgtacaattacaaccatatgtaacaggattttattaaaaaaatatcattaacccgtcagtaccattaatttgtataaatattatcttttagtttatatatatatatatatttgttacttaaatgtgatctctctgggcccactagcccccacaatcctttttccttcttaaagaaaaaaataaagagttggtgataaggttgattgacgtgtaagcccttatactagaccccacattattctttatccccaaaaatgtatcgagttggtagtacaaataatggtagattcaccatttaccaccaccactaattaaggagtatagataaagaaaatagcacataacccctccgtgtttctatgacaccgattacaatccacaggaaactaagcattttaagcgacaatcatatgcttacgatggaattatcatagccattcaatatttggcaaatgaagtgattgagatgaaatatttttttccttatccttaatctttgttaaagaacatactcccttcttccatttatatgaaactttggttagtttaaatttttactaaccaatgtcatatataaatggaatgagggagtataaagaaatgctttatttaagaatggatggagtaattttttagggtaattaatacttttagaattaatttcttactatccaaaagttaagaatgaatatatagaaaacctaaattaagttcaacaattcaaaattggtataagccacagttcaaacttcagctaattaatcaatcatcacctacatatatacatgtgagaaaattcattttttatatatcttgaacagctcacatgcacatatctactttctctgacaaataattatctgccagaagtacagttttgtaaattcctaagctgtatatattcaccagtcaaaccatacaagccacacaacaaaatggacctgcagccagggcccactgtttttgcatagctagcagtatagctcaatgttcaactggacacggcttgattgattaattgaaaatgaaatgccaaatagtagcagcattcattgtcctgtgctgctttctccccagcttaattaattccccaattaattactgtaggggtcgtcgcaagctttgcaacccccaactgacagcacttagggttcaaggtatggatggaatagatcaatagtgagagccataaatttagatacagtaacagcacgtactaggtagcagagggacagatcgatgatcatcgatcctagtcaccgatcatgaatgtttcaagatgatcgagatcgtggtcaccaattgagagatgcatggttacatcttttagcttttgttttgaattgaatcaaggaaattaatatgtaggaattgcgaataaaaccttaacaacttctcaattacatgaaagtcccacacaccaatgtatatatatatattcgtcaggtttcctccttcgacacatgttcaaatgaactgtgaaaaatcttactccaatgccaaataatacacatgtggtacataaagtactcatatctctacgcgtctaccgcagcatcatcaggcatgattcactaaacctcaaattttggcacatgcaaaatacaaacctgtcttacaattaattattggttcgaccaaatccactcaattattggttcgaaaacgagattttagcaaaatataaaggttggaatgcatgaagtcttctaaaatctaaattattgtatgttggaattgaaccatttcacttcaaaattaaaaactactataagacctctttggaatttttcttttgcatgtattaaactagttctatgaaaatcttaaaaatttctacgttctaagccctaaatactaattaaataggaacttgattttttaaaaaataaactgaggcaacaacctcagggtagtttattaaaacacaattgggagtacacaaggcccctcatagaacattttgaaacatgtaaaaaaagtcctctaaagaaaagtaaaatgtgatcaggtccttcaactccttccaccgagctgatgttccattgttccatccagtgtctacggtgatggtgatgaaaccatggcagactgcaaagggcatagtcaagaagcaaacccaatcaaggcctccatgatggaggttgaagctttcatggccaaacaagaaaaccacaatcatcgctttgagatccaccaccaaagtccacagggaagagcgccaacccttgcaggtctgctcattggaaaattgaagaatggccggcgtaaccttttattgcttgtggatttgaaggactacatgttacagatgttgataaccaaagcatcggttctaagcctgacggttgctagctagacggcatcttccgagaccaagtctagcagatccatccatggcatgacaccgccaggacaaaggagacagaagtcgacatctcctttaatctttacaagaaaggtgggggagggggacaaaggatctgtaacataatttacccgactatgggacgagcttgagcactcccccggaccccccctccccccaatcctttcaccggcaaccaccggggacgaagaggagagggattccaacgagacaaagacaccgtcacctgtgggtccttctctaattgtgagagaacgtgtgttgggggaatgaagtccgtcttaaattaaacaagagttaggtaagggtaattcaaaaatcttccaactatgcctaatgttaatcttactttcgagttttgagggattttggatcgaatgaagggacatgacactttgaaaatttgcacaactatgctttagcaaaaaagcattttaaaaataccgataaataacttttatcaggtgtttggttcataccaaacctttggcaatcaggtttgcttaacatgtggccaggggtggatccactccaccacccgatgaccgggctggtcgggtggccgcacaatgaaatttaaatgttttaattttcaatttatagaagcaaaattttcattgcaaacacttgatacaatattttttccccatgctctaaaacttttttgatctaccactatatatgtggctaagagtttttttcagccaaacaaattatgacataccacaccgcaccttagctctaaaagttggtaaactaaagcatatatacaaccaaacagccccaagtgtttctagctcccgccactggaaaggcgctgtgactgaactgtgcatgcttgaccgatccgagagaaaacgtacgatggcaacacaagcgaattcacgatgatgataatgcagggaccagcagtacatgagccgctagcagctagctaagcactgtctccatcgcatcctccccctcgctaagtcctcaacgaatcacacacatttcgatcgaccacatgcacgcatgcacaagaattctagcatacagtactactacaatgtgtgtgcatgcattgtattccctccctcccataatacaagggattttgaagaatacaacacattcagtacttgtagtactttgaatctgaacacatgatcatagtactatgatatattacatactttgaatctgaacacatgatcatagtactatgatatattacatatatttaaaatctcttatattttactctctccgtccaaaaaaactcaacttctggagtttgaattttgtccaaaaaaaaaccaacttctaccattctacctactcccagcaagtaaaatgagaagttttattccttcaacattctttacctacatatcatcattactattttttttaataataagaggtattttggtcattttcactctccactaatgttacattgggatgctaggatttgattttataagggacagagggagtaagagtaaaaaagaggagggtttgattttatatggacagagggagtaagagtaagaaggaggagtagaccacaaatggtactacactgttatatcacatgatgcatgaacacacacgccacagctagcgtagtacacaaagatacccaggattgatagcgagagcttcgatctggatgagaggctgctttcccgtttccttttctaggaggctacgctgagctagataagctgcaatgctgcatcatatcacgctcacaccaagtactacaagatacccacacacaccggtggtggtggtacactactactggcttctagcttttgccttttgatatgccaatctatggaagatcatggttcgtgcactggtgatgtggagagggtgatgctttctgtccctgatggacagataagtgcaacagtggcttggaaaagctggtgttgtgatcatcttgattttgaattaatcatggaaaagttggtgttgtgaccttgttttgcattaatcatgtagtagtacaactttggcatcttgctattttttttctttcaattcgattttcttggatgccatctagctacctagctaggcaggcaaaatgaagtgtaattattgacattataaagtgttctgtaagaatgtggcttgggtttttcagtaatcatgaggcactcctagctagttagttcccatatttggtgcaataatccaattcttttagttggaaacatagcattacggtgtactaagatttgatttccctagttcctacgaattaacgaaggatactggagtgacctctgaaaaccgctgcaagaaggcaagagagaataccatgaatagacagcagctgagcagcagaagcatccatccatgttgtccccagatgcatccaggggagattaatctgcaggaaacctcatgatcacaaacgcgaaaatcgccgattgatcggtccactgaaaaactggagatgataagctcaggttggtctcctcccataatagactgattacacactgtcaatcgttggctgcatctggcttgtcagcttatatctgcaggccatatcatgcatgcatgaatcccagaaagattggtctcctgggtatttgattatcagcatgggacagcctgctgatggttgcctgtgcaatgatgactaacctgcagcatgcaggcaatgcattgcaagatgacttgtttgattaaaaaccaaactctatggcaggaaggtaggggtaaactgggaccaaatgaacaaattcagtagcaaactaatttaatcaggtgagtcatctgatctactagtgtgcagaaggacagctgggcgcctgggctactgcaagttctagagatggaaaaaataatgccgacagaatggtgtgcaggtgtaggtcttgaagaattgtcaatccattatatgctggacatatgcatgattacatgtatcgagatgctaatacactggtagcattttgcagtagcacatggatggcatgaagcagagtagcaataaccaagtcctgaacccaaaacagcacagatgtttctttgaaggcaaacaatcttttgaacttttatcaacattgtaagttgtagctgtaagaagaatgaaaattaccaaagacagcaagagagaaaattattttcttgaaattttcagctcgggaaattgtattgagtatatcttaagataaaaggataacttgtagctggaaaatgacaggatgagacactgattgtgcgtacctgctagcatgtccccattgcatggatggaagattccgtgagtgctcttcagtccagctttttattggtttgggaagctttcattcatcttgagatctgaggaaatccgatgcatgctgcaacttctcatgacacataatacaggcccatgcgtgcggacgtggctttggtcctggacagactcaaagtggcagcttttgtttggagcgaacttgcaatgtcatcagacagattatgatagcttttgtttaagctgaatagcagaggctcagatttctccagctaacattacaatacaaatggtgacattgatacaaatccaaaattttgtcctacgacaacgacaaaacttgtttaaattatcccagggaacttcacccaaccataagtcatgagtaattacctggtgggatcattttctcctcagtttcaagaacatctacatgagaagagggaggattgaaaaaaatgtacaaatatgttacaataagggaattgggacagacaaaatttgctttgcaaaaggctttcacatattgataccgcaaagaaatggaagtaatggtactatctcctaacagcagctaatcaaatgaaggatcacgccgacaaacacaatgatactctggttaatttctgtagccaaccccaaaatgaaatcgccttgcttgtttatcattgaaagcatactcaagacgcaaaggtcccagtggggagtccacacggacgccaacaccgtaaccgtaaccacttcctggcttcccacgagctccggctgggtcacctaaacaaccaataaccaaaggtggcctaaatgagatttgggtttagcataaaagagatgctatcactgtaaatatggaaccatgtcaaaattgtttcagggcactaaacctcattaataaatgcaaaagacattaactttcccaattataaggattgtttttattttcacacctatacaaggcttaacaaagtagagaacatctactgactactagtcgacaggactgtgctgctttaggaccaacaggtacacaagtggaccacaaaacttccgaacatgtaaaatgcgagcagaacatggcttaccaggaactttgggaccagaactaagatcactaccatagtcaccaaacaccacaccttccaatggcccaaactacacacagaaaaagcactgtaagtaatcaagatgatgaatagaagtttgaccatcatgcatcaggtcataatatgcacttgtcatcatgacagaacaattttcgtatagaaattaatatactcttcaccatacccgtctaaagcaaaggaaaaaaatattattagagtgatacaactcatgaaatatttggtatagatacaactatttgccattctgtgcatcacatagtgtcctcaccaagttaactatattcttaaatacatccagtccaacaaatataacttcatcttaagttgcaaaataattttaatctcaaatactactatttttagttttcttttatgtatgcatatccatgttatcaactaggtatttatgggggaaaacaagtagttgtgtatgtaagtatatattttactgtactgatgattcaggttaagccccttctactaaagacagaacattccataaaaagtgacaaagcctaccatgcggcaagagacttctccactaccaacagcatatgagcggccagaaccaacagcaccttcttcatatcctcttacactatttgtcccaccaattgcaaatgcttcatgaggcgaaaagtttccctctacatgacctccagaagcactacagcacatagaaagagtgatttatggaatgagtaatacaacctgggcaatttgctactggaaacctttagggcaaactcatatttatgttccaagatccatacatggcatatgatatgcactaaaacataccttagaagaagtcgagcagggccaatttcatagccctgcctcaaacgcgctgtcactctgttaaaactgagccactcaggaagaataggaagaccttgctcaatgttgaaaacgaactggaagcagtaagaacagtaggtgataagagattttgacaacaaaaattagaaaataagcagtggagtaggaaaaatgctaaccattgttgagctacgatctccagagtctgtgtagacactttcaagcttagctagtagtgtatcatcataagcatttccgctgcattgtcatgacaagaacatcagattccatatgttaacatgatttgacaattgaattcatggtagattgaacataaaattatttatggcgcaaagttaaggtaaatgaagcatcgagatccaagacctggcagttaattggctgttatagaaatctctgatgataggattgcctttgtcatcacgagcaccagcatgctgcatagagtgtcagtaatcagtagaatgaaggtccccaaagggacagatttatagcaggaaccaaatcaacaaacttagtcacttgcttcttacacggttacaccattactggcggtacaaactgtgctcatgtactacatctcttcttttttgcttgatgctttggatatggacatgtaccattattacttcttctaattatgtatttacaaacaatattaaaaacataactgcatgaaaggaattttcatgataaatctattggtgctatttttataattaataaatcataatattttagcatatattaatgatttaagatattgaggtttgacgacgtcatctatatttaagaacgggggtagagtatccttttttatcctttaacctaaggtagtattaatgtcacaagattgtctagtctgggtcttctctcatggccaataagtacggagaaagggctacttgattactatggcaaatctattctatgtgaaaagtaaaactcaaaaagcaaccagaattagccacatcatctgtcaaaaaatggccgttggattcacaaaatgacaaaatagcaaggaaaaatcctagccattgaaacgaggaatcttctagaagtggtaaaatacacagagaaggaagagtttgagccactcattgcctctcattgtaatctcatgttggcctcccaaacaggtctagggctggcttggcttggcaaatcaacccaaacggtccttagactagatgaccaattaaataattttagaagagggaaaaaatattctacatataacactgtaaatcagtcagcagcaatcaaaacaatatatagaaaagaaattaacatctaattattgatttaactgaatggtggaaaaattattgttaattacaataacggttaatagataggaaggttatagtcgcgcgaacatgcgacttcattcactagttgtacctgaaatattaatccaagtgtgccactccatttaggtctgaatggtcgactgtattcaatgccagcagtaactcgtccaattgtaatgggcccatggtcaggatggtccccaccatggataagtgttccgggagtcctagagttctggcaaagaaaataattataagaacataacgatgattgtcagccataagtaactatggagcgttgaagacggaattgtcttaatcataattacctgaaccatgatagttctggaggtcctcttattgtcaccatcaatccaaggatcagtatagtttaatcgaaatatagaatctatttgccccctctccagtgagagattcagcttcttgttcctcccaaaaacatttcgatgagaatatgcaaaactgtttattccagtgcgagacaagaattagatgtgcaactccagtttgaggacaacttctgtaaggatattaactgatacatttgaagcaatatctaattcttcacagctgataatccaggatgcttcctagaagtttaagaagtctggtttctaacaaacaacaatcccaacattgttgcatagaaaaaacagctatattctggtcttccagcagaaacaagatcatattggcatgtggtaagaacagtacgataaacaaaatcagaatagccgaaggcataaaaataaaaagagtggaagaatctaccaacctgccaataagcccagaaagtggtccatttgttatcctgcagaaaacacagcatgccatcatgataaaatagatgttaaaacaacatttggatgcaaatttgcatatattttgcatatggtctttgaggtacagtaagtttaacattatcagaaccttatggataaggaaattatttttatgaaagcaaagatttgatatttcattcaattaagttcgctcagcaagccttgtactcacccacttgaaatgccaccaccagcagaaaaaccacccgaaggtcgttcaacaagattcatgacaagatcaactttattagaatctgcagaagatcataagtaagaaaacatgtgctaataagtgcaaataccagctttccgaaacagactgaactaacaaattaacattacctccaactggctgtggaattatagtaacatcctccatgattcccatagtaaggattgtttcaacatcccttttcacttgtgctctattgtaagcctattttcatcatcacaagtttagacagataatacagtatcactcttatcagagaattagtctgtattttcattagcaaaatacttctgcttcagattgcatgactacccctttctttctttctttccttttttttgcagaatacagaatttgtgcaaaattatatgtataggcaaatattatacataaatgttcaaagaatttaatgagtacactctaacatcggtataaaaattaagttttgtaattatggcatttgcattgcaatttcagaagcacaccaaagcaatgcttcaatgcctagtgcacagttcagtatgaaatggaaatggttcttgaagtcatatctcatgaaaactcgtatgttctagatataactgatatgaatatttgtgaatatcatcaacagtgacatagtgcttttaaagtaggtatgaaatggaactagttcttaaaatcatatcacaagaaaacttctacattgagaacacaactgatgtgaaatttgtaaatatcattgtagtggaatagtgttcctaaagtaggtaaacacaaatggagaaaagtgatttcaatgatctgacctgacccttcttggtggtaaggtgacggagtattgtctctggttgcgtcttcccaacagttggttcaccactggtgatggagagaaatagaaagaggtggaagataagaaagatcagaatatcgcatagaaataaaacagtaacaagtgaagcgaatctcaataaatcaggctatggttctcacgttcttctatccagaaagcgaatattgatattattaacctcagcttcagaaacttgtagcctcagaattcctccagaaagaatctcagcatatgaaacctgataccaaatcaaggggctttattgatttatcagtagtaaacaaaataccttgtttttcttgttaaaactgtaaaagtctgatgtgttttgccctacaataatgaatgccagagctcaacttatcgataggttgctaacttcagcattaaccacacatcatatttctaatcctgttaggactaagaatttaacaaataacagaggattaccatggtgtatgcccacctatttgacatcagcaatatatatgcaaatagtgcaggttagacaatctggatagcaacaaatcgactgctgttgttgtatgcatctaaaagtttgtagttacaaagaatgtactgtaaatcaaatgggcaccagaagcctgattacagcaatgctcaaacctcttaaacaaaatgtgatatagaaccaaatagcatacaaaagtagaagatgagttttatattcactgatttgccacttaccaagccagttagaccacgttcctgataccatccattaacagacttgatcacttgatccaaatgtcttatattgattattttccctgcatagtgtaatatgaaaactcaagtaggtctcaaaagaaaatgcgacaagctagaaaaggtacattaggattacaaagaggaaatgaattgcgcattctttctccatagagaaatggtacaactatgagatttcgtaggatgtagaaaagcatttttgtctatagggtcaaaatgaaccaacaataagagctgcaaagcagcacattttaatccagtggagttctggaattcaatacccaaattcattctagacaaatgcatacgctatgtcaaagatataggatactgaccaccgctatactttgatggctctttacccagattttacaataggagaacaacgatttgcattgctttaagcttttgatatgatgtatgagtaaatgaaacaaatgtagctttttaccctgacaggcacatatcctcaattatgataatctataccacatttcacttcatccaccacagcaggctaccgagaatgaaggtggacaagttcttaccatggcgatcatgaaatgcgtcctctaggaacttagatggcagcatgttggcaccctcacagaccaacccatggaagtcctggttcggctccacctaaaccaagcccaaaatgtgcaataatcagttccaaggttagctgacgaagagaaaatggggaacgagcaaataataataataataataataataatcctgacctcaaagacgagacgaatgccgtcacgggtgtcgacggcgacgggcatgcaggagcggaagaggccgctctcgacgacgcggtgcacgtcctcctgcacctcccgcaccgtgagcgccgcgttggggcggcacgcccggagcgccgccgccgcggccgcctccagctcgggccgctccaggggctccccgtccttccccctcaccgccacctcgctgatcagcacccgctcctctccccctccaccccctccgccgtccttctgcctccgcggcagcgcgatgggcgccgccgccgcccccgcccccgtctcggccctcgccacgggtagcctgggcagcgacctggccacgtggcgcaccacgccatcgatggcgcggccgatgcgcgcgaacgggagcgccgcggagagcagcgtcggcgctggcgctggcgccggagccgcgtcggcgcaggggagcttcacaccggaggagacgaagcgcacgtctcggcgcgtccccatggcggcggcggcggcgctggaatcgagctagggtttagggtttccgcggcgacgaggagagggtttcccccgccatgggcgatgcggaggaggaggaggcggcggcggaagagggagaagggaatggtggtgacgtcatccgcgttggcctctcgtcctcctctcggatgatgagggccgtcggatcgtctcgaatttcgttctgatggcggatacgtggatctgatccgttggatggtttcggggattacatccaacggcgagtattagaggtagagatgagaagtaccctctcacgctgtcacgccatgatccacgtggggaataaggtcattgtttagttcgtgaaaagaaaatttctgcgtgtcacatcagatgtttgagaagatatcgaaaagggtttttagacacgaatgaaaattttaattttataactcgcctggaaaccgcgagacgaatcttttgtgcctaattaatccgtcattagcagagtgggttactgtagcacttatgactaattaggtacaaaagactcgtctcgtgattttctccccaactgtgcaactagtttttttaatctatatttaatgctccatacatgtgtttaaagattcgatgtgatgtctttagaaaaaaaatttggggaaactaaaccaggcgttaatttgacactaaatcttattttcgtccttaaaccgaaaaaccaaatacaataggttcccaacttacaaaagcagtacaaacaaggtccctcggtagtattgtccccggtttttggctaacgtagcacatacgtggctaatttgactagtcttcgtcccacgtgggattgacgtggcgcttatgtggcaatttgatttggaaaataataaaattcgtgagcccacatatcagctacacaaaaaaaataaataaataatggtgagacctaggtgaatctcacatgtcattctcactcccctcctcttctctctcatctgtccccatcttctcttcatctctcttgaagacctaggtgtcgcacgactggaggacaagcgcggcggcggcaacggtggtcgtggaatcatcgggcagggacacagacgagggcctggcgatgtccgcgtcgaagagcgccagggtccaacgtgggtcacactctgcgcggaccaggcggtggaggtggtcggtggtgagggtcttgggccatcttgtcgacgagaggatggtcgatgacattgggtggcggcggcagaatgggcaagcctgcgagtacaagacatagtctgaactctgaagaccgagtctatgccacgtcatgtgcatgtaccgagtcaaattagtcacgtagacaccacgtaagctaaaaccaccatccaaaccatcgtgggatctatattgcaccggttttaacagttgagggatttgttgtatctggtattgcggttaaagggtgacaatcgaattcgctgtcaagttaagggatctaaagtgaacttattcctccacatcgccgtacgcttccgaaattgcaattttgcaaggtttcggcccaaaaaggaatgaaattctcaaatctcaactgaagcccaatacagatagaagttacggagaattttaggcccaaataatgggatgaagcccatattgtactatcgggattccttcagaatttgggtaccgctctaacttttttggttttgtttttcaggacatggaaaaaaaatcaactgcatttgatttttttaaaaaaattactgcgtttgaattttgaacccatagtggccagcatgatattagaacttgcacggtaccgtttttctttttcttcataaattaaccctttgtccatatcattccattgtccctttctgtctttcatgatgcatgctagcttttggggaaaaatattgaccgtcatagagtactgttttctttttcttcacaaattgcaaagattatacttttctgaaaggaatgcaaagattatacttgctctcaatcttcggtattggtatatagtattttcccaatgtagacattcgcacaaattacaagttaaaacatgtcaaattcaccgtggttgttacggcacgaacgacaaagagccacggcgaattcaaagcttgtgtttggactggtatgtgttgatttgacaaaaagtttttgaacgaatcgtgttggtttgacaataggaaaaatgactgcatgacatatcgacaacgatttgaagcatatttgcgtcaaaagctaggaaaaagtaggaaattcgtttgtgcaaccacagtatcatattctcatgtgaatggttttcctagaacccttcatttttgacacaaatcctcgtaaaattacacggtttgaaatgcctcgaacatggtacatgggaattggttttcctttcacaaaataagagaactttcagatgggatcagtcagggcatccacaatgtgagacactcctagagtgtcctcactaactgaggacactcgtagagaaacttggttcgcaatggagggtgcccctggatgaactccttaaaatctgaagcaacccggtgagggtactacatcccacagtgggtgtcctggcccaaggtagcccagtacaaaaatttcacccatacccctcatcagcccactagcccagcaacctcttcctctcctctttctagcattttctcgtctcctccgcccaccgtctcctcctcttccgatctctccctctctctctcttggtcgaacgaggcgcgaacggcggtggcgaacggcgagcgccgcgcgaggtggaagacggcgacgggcgtgtgcggtggccgacggcgatgggcgtgcggggtgtgaagcatctagacccccggtgttaattttggtaattaatgacaagcgctaattgtggactaaccgttgtctttgagctatacattttaagttaggtccacgtcatatgtgcgcatggatgattatcaatggattaacattgacggcgcaaagcaaagagaaagaagacggtaaaactagtgctttaatttagaattgatcgaggtgtagggcgatcaaaattgctagtttattttctagtttcgccgtactattaagaggggtaatgacctagcaaagagatgattgaattaccacattaggtcattgcattttcatttgtgctctatttttcatcacacgcacattcacttgcaaattcactgggttcggcctgaccagggggcggtcagaccggccacatagtggcggtctgaccggcgtgccctggccggtctgactggccccaagcaggcggtctgaccggcggcacttgtccggtcagaccggccctctggatgccgagatgatgctgctcgggatggccgatacagagccgatggagccgtagtcggtcagaccgagccgatggcggtctgactgagccgaggccggtctgaccgcccactcaactctggtctgaccggccaggccgatggggccctctgacagcacttcaacggctagttttctagccgttgcagagtagcacggtctgaccggccacatacctccggtcagaccagcaaagcacaaagttgggagatttcgcccccaacggctagttttggtgggtgggagtataaatactcccccaccagcagcaaggggactctcttggcacccaattcaattgcatacatcccttgcacctctctcacacccacttgagctttgtgttcatccatctagtgtgttagagggttgattagccaagagtcaagtgcattgcttccatttgtagagctagtgtggcacttgattgatcatctccacgccgggtcattgcttgttactcttggaggttgccgcctcctatacggcttgtggaggagttgccctgtgacctttccgagaagattgtagaggaagcccggcgccggtttgtgagtggtttggaattcaccaccttcggagtgaaggaagaactaccctagtgatcgaggcttgggtagtcctctccgtgggccagctcccgccttgcccaccccttgatgaagggggtgtgcggtggcttcgtggttgagcggtggagttgagctcgcctcaacggggagtaggaaaccggcgagtttccgaacctcggtgaaaaatctcgtctccttgtctcatttgatcgtcgcatttacatttgtgcaaatttacttttctagaaacaaactagatatcatatcaccctaggattgctaaacattgacataggagtgtgatttactttcttagagatatagttgagccacaatcaccctaggtttgcaaaacataacttagttgcttagttagagttgaccctcaccaagcctagcgacttaggttagttttgattaggtgtcatttagttttaaatcgcctattcaccacactctagtcgacatctcgatcctacaagttgtatcagagcttggtctctcttgattgggcttcaccgcctagagagaagatgtcgaacgaggtgaaccatgtagggaaggctcccatgtttaatggcacaaactattccacttggaaaattaaaatgtctactcacctcaaagctatgagcttccatatttggagtattgttgatgtaggttttgctatcaccggcaagcccttgacggagattgatcaccgcaacctccaactcaatgcccaagccatgaatgctttgttcaactctttgagccaagaggagtttgatagagtgagcaaccttgagaccgcatatgagatttggaacaagttggcggagatccatgagggcacgagtgagtataaggatgccaagcttcatttcctcaagatccaatatgagacattctccatgttgcctcatgagagtgtgaatgacatgtatggaaggctcaatgtcattgtgaatgatctcaaggggcttgggacaaactacaccgatcttgaggttgcccaaaagatgcttagggctctaccggagaagtatgagacccttgtcaccatgctcatcaactccgacatgtcaatgatgacacccgcaagcctcttggggaagatcaacaccaatgacatgtacaagttgaagaagaaggagatggaggaagcctcaccttccaagaagtgcattgctctccaagccgaagttgaagataagggcaagggcaaggtgaatgaagccaatgaggacttggaggaagagattgcccttcttgctagaaggttcaatgatctcttgggaaggagaaaggagagaggaaggggctccaactccaataggagaagaaatagaagacccaacaagactctctccaacttgaggtgctttgagtgtggtgagaagggacactttgcttccaagtgcccttccaaggatgatgatggagacaagtcatgcaagaagaagagtggaggctacaagctcatgaagaagctcaagaaggaaggcaagaagattgaggccttcatcggggaatgggactcaaatgaggagagctccgcctcatccgggtccgaggaagaaggtggtgatgatgcaagctccaaaaagaagaagatggccgttgttgccatcaaggaggctctatcactcttcgctccactttgtctcatggcaaagggctcctctaaggtaacatctcttagtgataatgagagtgatgatgattgtgatgatgtttcctatgatgagcttgtgagtatgtttgaggagctccatgcttatagtgagaaggagattgtcaagttcaaggccctaaagaaggatcatgcttctttggaggtcttgtatgaggagctaaagacttctcatgagagactcaccatttctcatgagaagcttaaggaagctcatgacaacctcctttccactactcaacatggagctctcattgatgttggcatatcttgtgatttgcttgatgatagtgctacttgccatattgctcatgttgcatcatctagcatttctatctcttgtgatgatcttgtggatatgtctagctctagctcttgtatttctatctgtgatgcctcacttgttgttgagaacaatgagcttaaggagcaagtggctaagctcaacaagagcttggagaggtgcttcaagggtaagaacactcttgacaagattttgagtgagcaacggtgcatccttaacaaggagggacttggattcattccaaagaagggtaagaaaccttctaaccgtgccactcgttttgtcaagagcaatggtaagtattgctccaagtgtcgtgaggttgggcatttggtgaatgattgccccggtggtaagcctcctaagacatgcatgtttgattctcattatatgattaggaaggctcatgatggtagcattgttgctagatatgtgggttcccctatactcggtggtaaaaagaatgccatttgggtgcccaaagctttggtctctaaccttcaaggacccaaacaagtttgggtacctaaaagagcttgatcttcttttgtaggtgaactaccacaccggtgggagccattgggtgcttgatagtggatgcactcaacacatgactggtgatagggctatgttcaccacatttgaagtaggagggaatgaacaagagaaagtgacatttggagacaatagcaaaggaaaggtaattaggttaggtaaaattgctatctccaatgatttgtcaattgacaatgtctctctttgtaaatctctaaattttaatttgctttcggttgctcaaatttgtgatcttggcttgtcatgtgctttcttcccgcaagaagttattgtttctagccttcttgacaagtcttgtgtgttcaaaggttttagatatggaaatctttatttggttgatttcaattctagtgaagcaaatttgaaaacttgtttagttgcaaaaacttctttgggttgcctttggcatagaaggctagcccatgttggcatgaatcaattgagcaaactttcaaaacgtgatctagttgtgggcttgaaagatgtgaagtttgagaaagataagctttgtagtgcttgtcaagtcggcaagcaagttgctactaagagtatcatgtccacatctagaccattggagctcgtgcatatggatttgtttggcccaacaacctataagagcattggtggtaataatcattgtcttgtgattgttgatgattattctcgctatacttgggtgttctttttgtatgataagtctattgttgccgagcttttcaaaaagtttgcaaaaagggcccaaaatgaatttagttgcactcttgtgaaaattagaagtgacaatggttccgagtttaagaataccaatatcgaggactattgtgatgatcttggcattaaacacgaactttccgctacctactcacctcaacaaaatggtgtagtggagaggaaaaatcgtacattgattgagatggcaaggactatgcttgatgaatatggtgtttccgattcttttggggcggaagccataaacaccgcttgccatgcaaccaataggctttatttgcatattctcttgaaaaagactttctatgagctaattgttggaaggaagccaaatgttgcctattttcaagtttttggttgcaagtgttatatttaccgaaagggtgttagactaaccaaatttgaaagtcggtgtgatgaagggtttcttctaggttatgcctcaaatagcaaggcataccgggtctacaacaagaacaaaggtattgtggaagaaaccgccgatgttcaatttgatgagactaatggctcccaagaggggcacgagaatttggatgatgtaggtgatgaaggcttgatgagaaccatgaagaatatgtcaattggagatgtcaagcctattgaagtggaagacaagccatccacctccactcaagatgagccatctacttccgctatgccaagtcaagctcaagttgaagtggaggaggagaaggtacaagatccacctatgccaccaaggatacacaccgctctttccaaggatcacccaattgaccaagtgttgggtgacattagtaagggtgttcaaactcgatctcgtgtcgcttcgatttgtgaacattactcgtttgtttcttgtcttgagccaaaacatgtagatgaagctctttgtgatccggattggatgaatgctatgcatgaagagctcaacaactttgcaagaaacaaggtgtggactttggttgaaagacctagagaccacaatgtcatagggacaaagtgggtatttaggaacaaacaagatgagaacgggttggtggtgagaaacaaggcaaggttggtggcacaaggtttcacaaaagttgaaggtttggactttggtgaaacttttgcccccgtggcaagacttgaggctattcgcatccttcttgcatttgcatcatgctttgatataaaactatttcaaatggatgtgaaaagtgcttttctaaatggtgaaattgctgaacttgtctttgttgaacaacctcccggttttgaagattctaaatatcctaaccatgtttacaaactctcaaaagctctttatggtttaaaacaagctcctagggcttggtatgaaagattgagatattttcttttgtcaaaggatttcaaaattggaaaagttgacaccaccctttttacaaaaatcattgatgatgatttctttgtgtgccaaatttatgttgatgacatcatattcggttctactaatgaggtattttgcaagaaatttggtgatatgatgtcgagggaatttgagatgtccatgattggagagttgagcttcttccttggacttcaaatcaagcaactcaaggatgggacgttcgtgagccaaaccaagtacatcaaggatctactcaagaggtttggcttggaggatgcgaagcccatcaagacacctatggcaaccaacgggcatctcgaccttgatgagggaggtaaaccggtagatttaaagctttatcgttctatgattggtagcttgctttaccttaccgcatctaggccggatatcatgtttagtgtttgcacgtgtgcacggtttcaagccgctcctaaggagtgtcacttagtggccgtgaaaaggattctaagatatttaaagtattcctctactattggcttgtggtacccaaaaggtgctaaatttaagcttgctggctattccgattcggattatgccggttgcaaagtggatagaaagagcacatccggtagttgccaaatgcttggtagatcccttgtgtcatggtcatccaagaaacaaaactccgtagccctctccaccgccgaggcggaatatgtttcggcaggtagttgttgtgcccaattgctttggatgaaacaaaccttgttggactatggcatatctttcaccaaaacctcactcctatgtgacaatgatagtgccataaagatagccaataacccagtctaacattctagaaccaagcatattgacatacgccatcacttcttaagagatcatgttgccaagtgtgacatagtcattagccacataagaaccgaggatcaactagccgacatttttaccaagcctcttgatgaaacccgcttttgcaagttgaggaatgagttaaatgtcatagacttctctaatatggcttgagatggtgcaccatggttgcttcttttgcatattgtatatttgctcctatttgttcttatgctttggatttattgtcatttggttcttcattgcgaaaatggagcatgtcacattaaggaggagtcttgcactcttgcatgtgttccacttccttttatatgtgagcaaatcaactaaaagtgctagtagtgttttcaaaatgaccaagtcaacataagtcaaaacttctgcaaaatcgatgcattttgaaaactatctcttggaaaatgttttaaaaggttccctatatgttttccaagcctcacattgcaagaaaaatgatttttgaatgaaaatgccattttggccctcttttgaagaaactagattcttagttttggataaaatgagatttatccccaaaatgagattgagaaggaatttgaggaaagtttcaaaacaaagttggtagaggagaagttttgaaatgtttttggtgttcaaacctatttcaaaaaccaaatcattcaaaagttatttgaaaatcaaattcgcccaaaaacccctatagaccataaaaggtcacctcctagcgctcaagtgagttttgttgcaaatcttcataattttcaaatgttatgaatggttggcaatattttaactcacacatttcaaaattgctccaaaaatcaatttttttattgaattttattgtgtgggggtagccgaactgtgcaagggctatgcacagtcggctgggggccaggcggtctgaccggtgctatatgcacggtctgatcggcctgatggcggcggtctgaccggccacttgggcccggtctgaccggccgcacccttgaggtctgaccggccgataatagccggtctgaccggccagggatagtgggcccaggaatctttctttttcttctctcttcttcccctacctgactccatctcctcccattcagctttcttcttccccaactcgaaaaaacacctcctctctcttttcccaaaccctagtcacctccctctaccaaattccctcggtctgaccgtggatttctctccggttacaccgtaagtgattctcctccgcttcctctctctattccatggattggtttgtgtttttgttgaagtttttgatccatggcatggaaccctaggtgaagcacgaggtgttcttcgatttgcaccaatagtgggtagtttcttggtgtgattcaactccttcaaccggtaaatcactctccctcttgcgcattatctcaaatcggtctatttcaatctctagggttttgggtagtttcccccattattccaatcttgatgaaataggccataccctttgatgttcaagttccaaacttgtgcaatattgttctagcaatattttagactcatttgtgtgattgttggaaggatttggttgtgctcctgtcagtggcggtctgatcggcaggcggtctgaccggcaccaaagcggcggtctgaccggcctagggcaggcggtctgaccggctaggggccgtcggtttgactgacttgacgccggcggtctgacagtccctggcccccggtctgaccgcccctgacaggcagcacccccattccttcctcttcactatgtggcttctaaaattgttgcttatccatcctttgctccttgtttttcagctatgcctccccgcactcgccatggtcgtcgtgagcccatgcccaatcccgtcaatgagaatgaggaatcaagcggagatgagtatgttcaaagtgatgatgacaatatggaaaatgttgagggtgatgagatggaagtaagtgatgatggtgatgacaatgggagtggcaatggtgaagatgatgaggcaagtgatgatgggagtcctctcgattccaccatccaatttgtgtttaatttgaggaatgctcaacaatacactatcctccgtcatcatgatcaattccggaggcctaacgattgtaatgatccaagatttcatacccagttccaaaagtccgtgtatgaacaagtgtatgccaacaaagccttcgccgaacacaagtggatttcttggaggcacattggtgagacaccggagtttgaagatttgcaagagatgttctggaccgttgggattgatagaattgtcaccatgaagcaatcttttgatgaagatctcatccggcaattctatgccaccgtatgggtgtccggcgattgtgatgcaatgaagtggatgtcggggacccttcaatgctctatcaaccgccgtgaattcaaggagctcttgcacattcgcttcaacaatggggatgaccttcatgatgagcacacccacaaccccttccccattgatcacttttctcagatttatgaagacgggggaaggcacacatatggaaaggtggcgggttagagggctctcccaagtgtgatcaaccacatagtaagggccaccatcctcccaagatgcggcaacaatgatgacatacgcggagttgcttggcatgtcattgatgccattttggatggtcgtcggtttgatgttatcaaccttatgatgaaggagattgccatctcaaaggggactattggacaaggaatctattatgctccctacataatgaggttgattcaaagcaagttgggacaaattggtcacaatttaaaagaacataaggagtacaagcctcgtctccaactctcctcccctaaagctcctcgtgtgcgccaaccaacatttgatcaaggtgcaagctcaagtgcagccccccctcctcctcatgggtctgatccaagtgcttttttccatccacaatatgcctactttggaatgcaacccaatgaattcttcaacccggtccttggggctattaataccctaagtgaaagcattcaacgcttatccaccgggcatgaagcattgcatgaagatgttcgtggcttgcgcaccgatgttggcaacttgaatacttcggtgggaagattgcatactagggtgggtgtattggattcttgagtccaaaccttggagagtacccaagcttttggctatcatcgtcgccgtgatgcttctcatccttccacttcggcgcgtcctccttctcctccgcaagagtgaagacctttttggtgcttgatgccaaaagggggagaaaagtgtgttttatgttttgtgggttgggactagtagtagtgaggttagtcacctcatatttaataggttaaggaggtttggactatattttgtatgggtatgggctattactctatattgtgtgttctttgtcgttttgttaaactctctatgtcatttggacccttcatggtcttgtaatagcctacatttatttgtgagcactttatgtggtcttgatgtgaacttgtgctatgatggatggttggtgtgacattgatatacttgtgaccatcttatgcattcggttgattcatatgtgaagttcacattataatttgcatatgtgttgtgctatgttgaattgtgaaattgaaatgtgcattggctccatatttgctatttgtgtttgttatccatatgtttagggggagcttttgcttgtcaatgcaatatatgtccatgtgctctatgtttgattatatatatttgtggtgttcgtcatcaattaccaaaaagggggagattgaagcatctaggcccccggtgttaattttggtaattaatgacaagcgctaattgtggactaaccgttgtctttgagctatacattttaagtcaggtccacgttatatgtgcgcatggatgattatcgatggattaaaattgacggcgcaaagcaaagagaaagaagacggtaaaactagtgctttaatttagaattgatcgaggtgtagggcgatcaaaattgctagtttattttctagtttcgccgtactattaagaggggtaattacctagcaaagagatgattgaattaccacattaggtcattgcattttcatttgtgctctctttttcatcacacgcacattcacttgcaaattcactgggttcggcctgaccagggggcggtcagaccggccacttgggccacttggccggtctgaccggcgtgccctggccggtctgaccgaccccaagcgggcggtctgaccggcgcataaggccggtctgaccggcggcacttgcccgatcagaccggccccctggaggccgagatgatgctgctcgggatggccgaaacagagccgacggagccgtagtcggtctgaccgagccgaggccggtctgactgcccactcaactccggtctgaccggccaggccgatggggccctctgacagcacttcaacggctagttttctagccattgcagagtagcacggtctgaccggccacatacctccggtcaaacaggcagagcacaaagttgggggatttcgcccccaacagctagttttggcgggtgggagtataaatactcccccaccagcagcaaggggactctcttggcacccaattcaattgcatacatcccttgcacctctctcacacccacttgagctttgtgttcatccatctagtgtgttaaagggttgattagccaagagtcaagtgcattgcttccatttgtagagctagtgtggcacttgattgatcatctccacgccgggtcattgcttgttactcttggaggttgccgcctcctagacggcttgtggaggagttgtccggtgacctctccgagaaaattgtggaggaggcccggcgccggtttgtgagtggtttggagttcaccaccttcggagtgaagaaagaactaccctagtgatcgaggcttgggtagtcctctccgtgggccggctcccgccttgcccaccccttgatgaagggggcgtgcggtggcttcgtggttgagcggtggagttgggctcgcctcaacgaggagtaggaaaccggcgagtttccgaacctcggtgaaaaatctcttgtctccttgtctcatttgattgtcgcatttacatttgtgcaaatttacttttctagaaacaaactagagatcatatcaccctaggattgctaaacattgacataggagtgtgatttactttcctagagatatagttgagccacaatcaccctaggtttgcaaaacataacttagttgcttagttagagttgaccctcaccaagcctagcaacttaggttagttttgattaggtgtcatttagttttaaatcgcctattcaccccccctctagtcgacatctcgatcctacagggtggccgacgacgacgggtgcgcggagtggccgacgacgtcggttgccagatccccttccctctgccgcggggccgtcgccgtcgagggtcatcgccatcggagtggcggcggggtggccagatccggcatgggctttccggatctagcctcgggcagcaacggcggtggcttgctggcgaggtcagcgcccggtcgccctcctcccgctcccctctctccctccagccgtcgccgtcgccaaccccagactccgccgccccgtgccgcctcacaggtcacctcgccgatgactccgccgccctcggcacccccgcccagcgccgcctcgcgggtcgcctcgccgatgtctggctcgcccttctcctcttcaaggccgccgagctcctcctcgccgtcacgatggcggctggtggagcggatcgacgagcgggcggcgccgtgggagagaggcaagggtaggagggggatttggggggagcggcgaggagacaggagcctgcagtgggtctcctcccagggacgagggttgtgtctctgcgaaaagtggtcgctccttgcaaagacccgcgttcctctgcttggcgccacgttcctagcctgggagacgactcacgctgaaaaggggatgggaggcaaacggccgtttgcgagggcacgggtcgagggtagggatggcaacgggtgcgtacccattgggttcacccaccccatacccacacccattgaaatgaaatacgcccgctccaatacccacacccgctcacgggtgaaaaattcccccatacccacacccgcatgggtgacgggtacccattgggtacccatacccattagagtatcaaattgagcacaccaatgcatccagtcagacagcagggcagcaacatagcagccagagatttttacaaattaggattgaaaagcacataaacaaaccatgcagccacattgcacaatcagcaaatcaagtgataattggaacagtgatataatataacccattaagtttaatagcaagcatgctgtccactccaaaatacatccatccatcgtacaatacataaatcctccagtgatccagtctcaattgagcaacagtccagccaattcaatggcatacaagtacacaacattacagcttaaatactccacaacagccacattgcatgtttgcatgctttggacttcaagatatcacacagtgacacattcaaaatcattacaaccaaaatgacatataaatagttcttaggctcgtagcagcctccttggtcttacacctacaacatcaattcattgtttgaaaccaaaatgcatgccatcctccagcctcaatcctcaaatagcaagttcctacaatagcatgcaaagtataaaccaaattagttgactaccaaaagagaatacaaagtaaagagaatacaaatggaaggaatcaataacctgaagaccctcttgaatgtcttgaagacaagaccaaaaggaaggttgttctttgttcttgtcatcaactgcaaaacaaagaattataaaagaattaaagagttagtttgtagtcaatgaactgcgtaagtgcaaattatatatacctttgtatttgtttcgaagccaatcctgtgagcagattagagcttccaacaacttcgaagtgagtcgactgcgatgctcactaaggactctcccactagtgctaaaagctgattctgaagcaactgtgctaacaggaattgcatatatatctcgtgctatcctcctcaaaacagggaaccgaattccagccaccttccaccaatctaaaacatcaaaactttttgtgtggatgtcaaccaaatcatcatccaaatagtggtctagctcagtccctactggccttcttcctctcaaactcatattggtcatatagcggtctagcgcaggaacatagatgaacctacatacatataaaccatgtatgtattcagatttaattctaaccataaaaaatgaagtacatgttagtggctgtcagtcacaagaaaatacctcataataatacttctaagtttccaagattcatcaacaaagtgggctgtgatagccatataacctctcttctgattgctcgaagtccacaagtcagtagtgatagccaccctagattgaattccagccatgtattgaatggctttcttcctctcaaactcatattggtccataatttctgctctgaaatcaaataaaaaaaccacagaaatgaattattaacagaaataaaaaaaatcacagaaatttatgctccgaaatcaacaaattccagccatgctgtcataccttattgtgttcctagtcccaaatttgaatagtggctgaaatgcagctacaaatctcctaaagccaacatgatcaaccatacttaaggggtactcatgcagcactatcatatcacacaattctcttctagctacatcttgatcaaatgtatagttctccactgtaatatttttagaatctgctgaggaaaaccttagagcagattgtgtcaaagtctttcccttcagcttgatcttcttttgcacacatatcttcaaggcaaaattggttatatagaattgaaagttcacgtttttttttatagcaccgaaagttaccggttcactttaatagcacccaaagttcaccatgttcccatttttaatacttccgtcaattctcgatcgttttccgtccgtcttgatccagtcacacacacgatatgacgtttctacccctcacaagtacaagtataatgcatgtcaatgaggggtagatgtcatatcatgtgtgtggctggatcagtaacgatcaagacggacggaaaaaattgacggaagtgctaaaaatgggaacagggtgaactttggatgctattaaagtgaaccagtaactttcggtgctataaaaccaaaaacgtgaactttcaatgctatataaccaattttgcctatcttcaaatggtcatgaagatgtttagtcccattctttgtggctcctgatagcttcttggagcaatgcatacattttgctttgactgtgcctatatacttcactctcttgaattctttcttcttcggcctcatcttcgtcaccatcaacttcaataggttctgagtcattgatagattcaggttgtggagatgtggagagtggaagagactctgattttggttgtgatgcttgagataatggagattgacgttgatagcttccactcccactagctacggacatctttttaaatctacatcaaacatattacacgtctagtcaaacatccattaatatgccaaacatatgtaaaaaaatatgcaatgagtagcatctcagccccaaatacatgtctaggttcttctattccttactcacaacatattcacaaaaatacattacaaccatgccaatgcgaagtttaaattaagatctgagttcttgtgttgcttacccaaaagaaagtagaatgttgcggtctcctgcagctgcagtagttgtaggagaaactggaggctttctgctcttgacagccgcagctgcagtggtcttagccttggagggggggggggcgacgcttcgaacctgcaccaacaacgttagccggagaagcacttggctttgcctttgccttcggatcagagacaatgacgccggataggggttccgctgtttcagtggaagaaggtggtagaaaaatggttaaaggagtagccggcactcctttgccggtgttgtcttccttatccaccgcatctggtcaatggagatggcgtcccttcggacggcgaggggtcagtagatgctatagcagtagagcctgacaattagatatagctgcaacagttaataaagagggaagaagatcaccggccgtcgtcattgccagagccggagaccgccgccatgctgcgtgcagtacgcgcgacggcgcaggcctgtactgcgtgcggcgtgcggtggtggcgtacggcggcgagcaggcgaggatgccgtgtggcgagcacggtggtggcgtgcggcggcgcggtgcgggcgtgcggcggcggcgagcgcggtggtggcgtgctgcagcgcggcgcgggcggcgtggcgtgcgacggcgcggctggcgcgggcgagaggcgccatagccctagggtttgtggcggcggccacctacagcaacacagtaccggggagggaggagaagtgaatcagtaagagggagaggaaatgggtttttatatctagggttagacacttagacttagatgcttagatttgttgttgggccttgggctgcttgtattttctgggctgaggcatatgggtatttttaacccacgggttaatgggttcgggtggatggagaacgttccaggacccggcccacccgatgggtgacgttttagcccgataagagacccatgggtgcaatatttggaatacatttgactcctaatagagtaaaaacctatcgggtcgcgggttatgggtccccgttgctatccctagtcgagggcacccattgtggatggcctcaggatcagttaagccaacagctttgcatatgatggggatatgacattggggcttttgcttcagctttgttggttttgcccctatcctataaagccatggataaaggtgaagggaaaaagaaagcaaatagttcagtggagtatgactaggaattatgaccctagtgcttggaagttgtttgctgaaaatgatccctttgatactgtttattgcaaactgtggaggacacttcagcatgaaagcctgacagttcttgatggcctttccttgagaagacataaatcaaaccctcgtgcctatgttgatggagattgtttggtggcctttgctgtacatacatgtgttcacgatcacaagttcaaatgtttggtcgagtttctgcacgtacatattaacatagacagcgtttagttccctttaaacttccaaaagttacgtcacatcaaatatttagacacatgcataaaatattaaatatggaaaaaaaaacaattgtacagtttgcatgtaaattgcgagacgaatctttttagcctaattacgtaatgatttgacgatgtaatgctacagtaaacatttactaatgacggattagttaggcttaataaattcatctcgtagtttataggcggaatctgcaatttattttgttattagtctatatttaatacttcaaatatgtgttcgtatactttaaacacgaccatacatgtgaagataacataacctaacaaagtacacaaatgctgtaaaggtcataattttcaagaaaattccgaccgatgatttccatttctagaaaagttctgacaggcggagactttccaaaccgtttttttcacctagaagtctatttcttctactgatgtgcaatatttttacgcgttctcgaaaaaaacttttcaaaccttttttaaccctgatttctatttttttgtctatttacgttgactaaaattcttcgtaaccaaatattacctccgtcctaaaatatagctattttagcacagtgacttgttccaaaatgaagctatttttttacctaccattttctctcaaccaatcacaaccgttctcttcacctactttctcttctttatcaatcacaacccttctctaatcatttgtatctacttttttcatatacgtgtctattttaaaaatgtttacattttagaacagatgaaatagtaagatcaggtacaatagcaggttataaatcagctataaacatattttaagaagatgatagacgagagagaacagctgtagcacggactctaagatacagtgtgtgtatgacaggtgggaccatgtattaatagtgtaacatgtaactattgtataaattgattattaagttgactagagattatttagggctaatagttagctatactaatgttattactctaatcctcaagattcacatgttgcagcgcgagttcctgggatgaaccctttttttcatcacattcacgcatatggtcagcagggtgagcgagcgagcgagcaagcagcagggggatccatcgatccgtccgaatatgctctgctctgctttgctttgcggtgggcatcgggaggcgcgccgccttttggggtttttggtggcgcgcacatcgccgtgcccgactgcccgtgcagtgcatgcaaagcgacagaaaaaccacagcgggggggtactcccccttttcgctggagccgcgggactcatggcatgggcgggcgcccgcggcgagcggagcggagcggggaccaaaacaccggaggaaaacgtcgcgctcgcgctcgcgctactgcaactgcacgatcatcgtcagttcccccacacggccacacccgcgcacgcgcgcggtcctactcctcctgcaccgcacccaggaaggagccactgctcggctaccccgggcggctcaccgacgaaaatttcattaaacttctatattgttataaataaatttatgatgaaatttctataacaaattacttatatattgttatagaaatttaattagttataatgtagttttgtccgcactcaaaaatctttctagctccatcacttactgtgccccgtttttgttgcacctccattctgaaatagtgttttcttttttcccttagtaacttctactctcttatttttcatgcacatattttacaaaacactagatgatagcatgttttcttaaaaaaatattgaaaaaataattttataaattatattaatccattgttaagtttttaagctaatacttaattattcacgtactaatctaccgctccattttaaggtcgaggaaaaggattcccaacttactcaaaggaaaacaaccataataccctactttattaaaacccaatacaactattctcaactttatctactcttagagtccaagtgcatttgttccctgctttcacaattgctactgcctttgtttcgggttataaaacgttttgactctgcttcaagtttgactaagtttgtaggaaaaaataataacattttcatcccaagacttattctacaacggaggggtagccttttagctacacgtgaaacaaataaatcattaacgaatgattaattgagtagtacaacctccgtttcatacaataaactgtttcatttttttctaagtcaaaagtttttaggtttaactaaatttaagaaaaatataatattaattttaacagaacaaagaaaattgtttctatattagatgtaataaaactaatttagtactataaagtgcttctatttttttataaacttagtcaaacttttaagaagttttgacttataaatgtcaaagcgacttataaaatgaaacgaagggattattagctgctcccttcatctaaaaatataggtctcggattggacacaaaataagtggcgtgggttcaatccgatataacgatactaggttgctatatatattttagaataggtgaaatattacaaattcaaaaaataagtttattcttttagaaagaaaacatttatataaaaagttcttgaaaagaatacactggctagaacttcaggaagagtgctcatggaaaacgagaaaattgctaaatcctagtaattcagtacccaacaggcaataagactaagaccgagttcttttcagcaactcgaaacggtgtttttttaaaaaaaaattatatagtacaacacatacactcacaatacacgcacactcacccctatgaacgcacgcatgtaatccctacctctataaacatcttcgaatactgggctgataaatcctttgggattgacgaagtcaaccgaacttaacgtaccgttttgtgaaataaatatagtataatgtattatctctatcctaaaatataacaacttttggctatgaatctggtcacacatttagccagattcataactaaaaatacttatatttgggacggagggagtatatattttaaaaattataattgttacccttgctaatcaccccgtctcatttcgcgtgcgagctgaacggctcaaacgaacgtgcctaaatcaagtttaaaccaagctcaaaataaatatagattcaccgccgttcgtcggcaaccgtttaattatcacggttactgataaatttgatagggatatgcctttcgactatcgttcgcattttgaaaccctggtctgagttgtcattttctcacagtgctaaagtcaacaccaaatgtccaatgctgtccatctatttttattcggaatatatgtgttttgaatactaccttcgtcccaaaatactcgtcgctttgggttggtttggtttgtggcctaaataggccttaccaaattttgtcaatgccaaattctggtaagttttggcatgactaattttggtaaggtaaaattatgtttggattgaagtaaaaatagcctaagttcactattgaaatggcctattttattaggcatgccaaaatttggcttcaaaccaaatagacactaaacactattgaaattgccaaatattggtaagtctaatttaggcctcaaacaaaaccagccctttaagtttttgtttgtaacttttgattattcgtcttattcaaaaaattacgaaattattatttattttttggctttattatcaaaagcactttaagtataacttatctttttttatatttataatatttttttaaataagacgaatgataaaaaaaaagttagagtgataactaatttaggacggaggtaatacatacgaaatatgagccagaaaaggccagccaaatttgtgggcagggatatgggggaatcttcttgagattgcccatcatctataagcatctagagacatcctatccaaatttgtaccaccataacctttccttttacataaggcatacgaatgcatattattgagagcaccacaccaactaggctacttatataggtcactgcataagaggagataaaggcatgagcttttgttaagcaccttcattcgttttcaatctacatgaaattttggtcaggtgggtcgagccatggtgtatgttgacgtgccaaatcagtgggagcaatgcgcattaactgagccgattacaaaatatatttaaaaatactcaatatatttttatttatctcctatccatttcaaaatgtaagacttggtcccgttcgtttctgtactgaaaaaagtggatcaaaatttggatatgtgtgacactcttttcaaattgctaaacggtgtgtttcgtaaaaagctttcaatatgaaagttactctaaaatatcatattaatttatttcaagtttgtttggtacgtaaatattaagattaagaaaaaaaatcacgtttcagatcccagtgatcaaattcttctcacggactgattggctaaaaaacgtatggatttttacgcgttgaaataagtacactagaaatgcttatactatgatacaaattttaaataacagaaatacttatattttggaacactaaactaagacatactaatatgcattgtttaggggcttatatgagaaatttcaaaaaacgagggcaaaacaacgaagcaacgaaaacgataaacatggagcggagaaagcgagcgcgcatcggcgccaccccgacaaatggcgatagagcccaaatccaaaccaaactcaaactaaaaaaacaaatcccaccgaaaacgatataaaattcgagcgagggccaaagcgaaaagccgccgaatccacgccatttcccacccaaattccacccgaattccaaaccccaccaaatataaatcaaatcccaacgtgacctcccccgcggccgcggcctgcttcacgcctccctcctcctcgccgcctcgccgcctcgcctcgcctcgcctcgcctccaccgcctctactaaaccctccgccgccgccgccgccgcggtgatcaccggcggccgaggtaagccgccgctctgacgctccctcttgacggacggcgcgtttggtctcgccgcctttggcgttccgtgtttttatcttcgcccggattccggatggattttgattttgattttttttttgtttctgtttcccccaaatacccggggccttgtttgggttcgtggagataaacgcgtagtaggcggagttgctgcgggcgccgcctcttttttttcttgttcctcttttgtcaaatggacagttcgttggttgtcgttggcgcggtggagttggatttgtgggatttttttttctcgggcttaatgcaagtggtggttaaacaatttgcttcaacgctatcactgaacttagaatgtaccaaaaagatccaaacagtttgatttaatgttattttactaacaatttgggggggaggctgcacctgttagtgcttaccaggactatacttttggggatttttaaggagtttacatctgtactgagttcataattatctgtactgagttcataattatctgtaccgagttcataattcatagttcaagttgtacttgcagtacagaagtttgtgctggattatgagaagctattattatatcttaccaattggctgtaaaatatagcatggacatatgaccatctaaatttatgttggtttttggttgttcctgggacagggatggagcagaatggagagaaccatctcaaagatccacttcttcaggcagatggaggcggctccggtgcttctcccgccggggcgtcgccgcggaaggagaggaagacgaggaaggtcatgttcaatgtccgggggatctcgtgtgcttcgtgcgccgtgtcgatagagacggtggtggctggcctcaagggagtcgagagcgtctcggtttcgccgcttcagggccaagctgttgtccagtacagaccagaggaagccgatgtaagattgccttgagctgacggtcttgttctcaactgcactagatttccccagcatgggagggacaattttgggtgtttctcatcatggggcaaaataggatttaggattcaatgcatatctatattgtccttattcaagttattgtgggccagttctctatttgactaggagtatatgtctgcaactctgcatgaatttaattccagcaatatggtggttttgaattccaggagctgaattttatcctgtagatgtcatgatttaggtaattaggatacatgaaaattttgatttcagctttatattggtcattcatataaggtccacgagtaagtactacgaaccagtgactatcttaacaatcttttttgtcagcgtgggccaaacccttgacaatgactgtgcaatcatatgatgacctttatacctcatcgagttcatgttctccaggcctggaatattgaattacttcgcaatcatatgatcttttttacctcttactcagaaatttttactagcagtttggttcgaatcagtatttatcaaggttctaaaaattggtaactggtacttgacagttagtgaccatatagcctgtgatgtcaagttcaggctcatgtagtctcatgttctttgtatacagttgccatcatgcaattgccagttaggctgtatagtcactaatgagtgcaccaactggtaacttttgtctgcatggacatgctttcagttcactaaactcatgtatatttcaagttgcactcatgaagtaatgacaggatattttacggtttggcattattttccatctgttctcagtttggattcttattcttccaggcaagaaccataaaagaagctatcgaaggcctcaatttcgaggtcgatgaacttcaagaacaggaaattgctgtatgcagactccagataaaaggaatggcatgtacaagctgctcggaatctgtggagcgagcacttcagatggtacctggagtgaagaaagctgcagtgggacttgccctagaggaagctaaagtccattttgatccaaatatcacaagtcgtgatcttataattgaggctattgaagatgctggatttggagctgatctcattagttccggggatgatgtgaacaaagtccacctaaaactagagggtgtgagttccccagaagacatcaaactcattcagtcaagactggaatctgtcgaaggtgtgaataacgtggaatgtgacacagcgggacagacaataatagttgcatatgatcctgatgtcactggcccacgattacttattcagtgcattcaggatgctgcacagccccctaaatacttcaatgctagcttgtattcaccaccaaagcaaagagaggcagagcgccatcatgaaattaggaattacaggaatcaatttctttggagttgcctgttttctgtgcctgtattcatgttctccatggttctgccaatgatttctccttttggggattggctgttttacaaagtatgcaataacatgacgataggtatgctattacggtggttgctgtgttctccagttcagttcattattggttggaggtacaatcccatctctcgaacagcttcttcttgatgttgtttcatgttccttatctcaagtcttttgtttattgtatttagcctaaatataatgttgccttcgtttgtttccttcattgcacacatgcactataaatcatgtgtggttattcactatgtgttattttactgacagattttatgttggagcttatcatgcgctaaaacgaggatactcgaacatggacgtgcttgttgctttggggacaaatgctgcatacttctattctgtgtatatagttctgaaggcactaacatcagagtcatttgaaggacaggatttcttcgaaactagtgctatgttgatatcttttatattgctggggaaatatctggaggtggtggccaaaggaaagacatcagatgctttgtcgaagttgactgaacttgcaccagaaacagcttgtcttcttactttggacaaagatggaaatgccatttcagaaacggagatcagcactcagttacttcagagaaatgatgtcattaagattgtccctggggaaaaagtccctgttgatggtgttgtcatcaaaggccaaagtcatgtgaatgaaagtatgataactggtgaagcaaggcccattgcaaagaaaccaggagacaaggttggtattttttggatcctgattgtatttgctcttgttatgaactagtatcctgatggttcaattgacttgtttttaacaggttattggtggtactgtaaatgacaatggttgtataattgttaaggtcactcatgttgggtcagaaacagctttgtcacagatagttcagttagttgaagctgctcaacttgcaagggctccagttcagaagttggcagataggatttcacggttttttgtcccaacggtaggttcgcttgttttctcctgcaaattcccttcgtgctatttcccaccagcgtttacaaaattgcaacattgctatattctacctgcctagctactggttaataacaactggctacggaggtaatcgaggtatttatcctagacagtagacacatagtcaactgcactggaaactttacctgtactggtcactagttatcgcactaataatttcttggtatttctaccctagacttagtcagcattcatctggaaactttcttgaacctaccccagcttctactgtagaatcgtagagcaaattatattcaatttagtggagtagcagttttaactctactccttaccaagttcacctcctctgtaaacagctggttacttatgagaaatgttaccctgattgatacttgcaaatgtttcctaactacttttgatgcttctcatgcatactttctgtgagatcgtctctttcttcatctcatattggtccctctcattttaaggttgtggtggctgcatttcttacatggcttggctggttcgtagctgggcaattcgacatataccctcgagaatggattccaaaggcaatggatagctttgagcttgctctgcagtttggaatatctgttcttgttgttgcatgcccgtgtgctcttggactggctaccccgactgctgttatggttgccactggaaaaggtgcttctcaaggtgttcttattaagggtggcaatgcacttgagaaagctcacaaggtaactgagatgatttctatgtcatgtattattttttctcacatcaaatgtattctattttttttatattgtgacactaaactattccttgtatttctttatgtgcaggttaaagctatcatatttgataaaactggaacgctgactgtcggtaaaccttctgttgttcaaacaaaggtgttctccaagataccgctactagagctgtgtgatttggctgctggtgcagaggttggcttcttagatgcaaatgctaataatttttgttgaatgtcgtgtgatgttcctagtttgctgtctcatgtcatctaaccttaacttttttctaactttgtcaggcgaacagtgagcatcctctatcaaaggctattgtagagtacacaaagaagctcagggaacaatatggatctcacagtgaccatataatggagtccaaggactttgaggtgcatccaggggcaggggtgagtgccaatgttgaaggcaagctggtgctggttggaaacaaaaggcttatgcaagaatttgaagttccaataagttctgaagtagagggacacatgtctgaaacagaagagcttgctaggacctgtgtgcttgttgctatcgacagaaccatctgcggagctctttctgtgtcagatcctctgaaacctgaggcaggccgtgccatttcatacctcagctcaatgggtatctcgagtatcatggtgacgggcgacaattgggctacagctaaatccatagctaaagaggtcgggatcggcacagtatttgccgagatcgatccagttggtaaagccgaaaagatcaaggacttgcaggtgcaatcttttctccttgcagcaaaaacaaagttggaatagatcacagattttaccaccattattccaacttacatcacatcatttgttcacagatgaaagggttgacggtggccatggtcggcgacgggataaacgactcgccggctctagccgctgcagacgtaggcctggcgattggggctggaaccgacgtcgccatcgaagctgccgacattgtcctgatgaggagcagcctcgaggatgtgatcactgccatcgatctctccaggaagaccctctcaagaatccggctcaactacgtctgggctctgggctacaacgtcctgggcatgccggtcgccgcgggcgtcctgttcccgttcaccggcatccggctgccgccatggctcgccggagcttgcatggcggcctcgtcggtgagcgtcgtctgctcgtcgctgctgctccagctctacaagaagccattgcacgtcgaggaggtggctgctggacccaagaatgacccggatttggtgtgaagactgaagaagcgtcggtcttgctgtgctgactgaaactgagcatgaagcaaacgccttgtttgcagtggccctcctgactgatttctgtacagtagtcatgttttgggattctctgtttttttttgggtacttctgattgattcaataataatttggggagcttaattgctatccagtgatatatagatgtgaaattgtgtttaaacagtggagaacagttgttgtattttctggcaagtgaccattgcgacgttgtagcattggactagttagtaactagttgaactgtaaactcattgcaaaagtaatctactctttagttatcctttggaacactgcatgcttatcttgcggaaaccgaactgaatcctctgaaaatcctataacatttcatctcaaatttgtaggaatatgttcgtcgatacgcgctatttcaaacaataaattcaaaagagcactgctacaccaattaaaattttcttactaaactcttaccctcaatgatctcaaccctcaattatctcaaccgattgatttaactatatgggattataaaaaatctaggatatattaatagcatgacacatcaatgctaataagagttcagtaagaaaaacgtagtaggtatagtcttttccaatcaaaaactttctgctctaaaatcatgtgaaaattcgtcgagatgtcaggacgggaacggaaggaaaatgatcggtaggcaacgacgaggaggaagaagcagcagcagcagccgcgcgtcccgttggttcgcgccaaaaatagcagaaaaaacccgcgcgcgcgacacccgcgtcgtcgtccgctcgccgtgtctaaacatagctaagctccccttcccgccgtatatataatccggcggcgcgcccctcctcgacatcgccgtacctacaaagatatcaacatggtttcctccacgagaaggacgacctcgtctctatccgccaccaccgccgccgccatcgcggcggcggcggcggcgctgatggtgtccgtggcgttcgccacagcgcagtacacgccggccacgccggcagcgccgggggctgcagcggcgggtgcggcggcgggggcgacgccggcggcgccgtacacgccggccacgccgggggcggcgggggcggcgccgtcggtgccggcggggccgctggacatcgcgcagctgggggcgaagggcgacgggacgagcgacagcacggcgttcgtgctgcaggcgtggaagaacgcgtgcaacgcgacggggacgcagaagatcgtgatcccgccggggaactacctcaccggcgcgctcaacctcaaggggccgtgcaccagcagcatcatcctccgcctcgacggcaacctcctcggcaccggcgacctcaacgcctacaagaccaactggatcgaggtggagcacgtcgacaacttcgccatcaacggccacggcatcatcgacggccagggccccctcgtctggacccacaaccagtgcaacaagaactacaactgcaagatcctccccaatgtaagcaacccacacccccatcgtctctctctatagctacctcctcctccgtttcatatcataaagtagttctatttttctattcaaacttatttaaattcagctaaatttgtatatacaaaaaagtaacacctataacatcgaattaattagtttcgaataaatcttatactctctcgtttttcatgcgcacgctttacaaactgttaaacgttgtgtttttttataaaaaatataaaatagttgtttttttaaaaaaattatattaatatatttttaaagtttattttagctaacgtttaattaatcaaatgctaatagatcactccattttgcctttgggaaggtggagtttccaacctccacatctgaatatagcctaagctggtcttttaaccagcaaacactattgagtatcacagtccatttataattaattgacatgggcaaaataaccaatgctgtgatagtaatttgtattgttatcttcttgcttctctgtatgactaataatgggcaattaattaaaacaatggatggatgcagagcttggtgatcgactactcgacgaacgtgacagtgagggggataacgctgaagaacagcaagttcttccacctcaacatatacgagagcaagaacgtggtgatcgacaaggtgaccatcacgtcgccgggggacagcccaaacacggacggcatccacgtcggcgactccaccaacatcaccatcagctccaccaccatcgccgccggcgacgactgcatctccatcggccccggcaccaagatggtccgcgtcaacggcgtccgctgtggccccggtcacggcatctccgtcggcagcctcggccggtacatacatacatacatacaactgcccctttccttccctatagctaagctagctagcacctgtttagatcgtgaaaagaaaattttttaatgtcacatcagacgtttgaccggatacgaatgaaaaaactaatttcataactcgcctggaaaccgcgagacgaatcttctgagcctaattaatctgtcattagcacatgtgggttactgtagcatcattcgtagtattttgaatatctatttaactattcgtcttattaaaaaatacgtaattcatatttattttgttctaagttgttttatcactaaaatagtactttaagcatcttatgcaattgcataatttttttaataaaacaaatgatcaatatgtgtctaaaagtcaatgacatcatctattaaaaaaccagagatagttaataactacttagtagataatttgtatgtatagaacccgataatattaacttctgttgtgtgtggttggccatctctgcaggtacaaggacgagaaggacgtggaggacatcatcgtcaccaactgcacgataaagggcaccacgaacggcctccggatcaagtcgtacgaggactccaagtcgcagctgagggcgaccaagttcctgtacgacggcatcaccatggacaacgtgagctacccgatcatcatcgaccagaagtactgccccaacaacatctgctccgcgtccggcacgtccaaggtcgccgtcaccgacatcgtcttcaagaacatcgtcggcacgtcggcgacgcccgaggccgtcacgctcaactgcgccaacaacctgccgtgccagggcatccagctgcacaacgtcgacctcaagtacgccggccaagggaacaccaccctctccgtctgcaagaacgtcgccggcaagtccagcaacgtcgccaaggagctcgcctgcgtctgattttcatcttattatactactcttccgtttcatattacaaagtcatttgtttttttttaaagccaattttttcaaagtttgaccaaagttttttaaaaaatatagtagtattttcaatatgaaaagaacatattatcagaatatatttcatattggatttaattagactaatttaatattttatatgttgctatattttttttataaatttgtttaaactaaataaaaattgactagaaaaagtcaaacaacttataatatgaaatggagatagggggagtaattgtcgtctgattatatagttgtaagttaatcatcgttccctccgctacattcccctcacttgtattcttcatctaattattttcctctctctccctcttcggatttttttaattattttcttctatttatttttatgtttgcttcttcttcgtttggaatatatgattcttgtcctgatttcatttcatttagtttactcgttaattgattaattaattaattgttatccgtttagttgtcgtagtttaatctcttcagttcaattatttttttgtttgattcttatttgtttggaatatatgtttttctttttctgattctgattcggatggaaactgatctgattcgtacaaaatataaaaataaccataccataagccgtataaggaacaaacaaagaatgatcacatgagctctgtctaaatctagcttaattcatcatggccatcttgaattttgcaaatcaacgttctcggtgcttgtttgagaccatacaaggctttcttcaatcggcaaacaagaggaattgctatgagattcgtgcgtacaaaaggtgatttgcaccagggtttcccaaaccgccggggccggggttaccgcgcggtaaccacagttaaccgtgaaaaaccatgcaaaatttatcaaaaattcaaattattttttaaatttatttgaatttaagaaggttaccgcggtatttatattaccatacacccgcggtaaacctagtaaccgcgcggttaccgacggtaagtcgaaccctgatttgcacccagtaaaacattttgttgtgtttttacttttgcttttaccagatagcttgctaccacgtactagcatagccctgcaatacatgcagcatgcacgagtggtttcaccagctcacctccaaaatccaaaccaaaattttggcctcaacgttctgaaccgttcgatcatgcgaccaacattacatcgattttcacatccagcattgcatgccaaaatcactgagacaatgacgacttcaaataagttcttattgtaactggagaacattaattacatcccttctgtaaagctcagggaagcataccttattagtatttttaccatcactaagcactaaaatatagatgtaactagctagatacattgcctcattgcatgctttcttcagagattattgacacactgatgagatgaaagcaggctatcctctatatgttggatcatggaagtgcaggcagaaccttcccagtgcaggttccgaatccgacattgtagccttcaccctgtaaaaacatgtagatggatggcatcaagatagagcatggaatcttcaaagatatttgttttagacgaaaagagctctaaatttggtttgatcaagacttatgagattgctgtaccttgcaacaagctgtcaagatgacctcatccccatcttctaggaacttgcgggtcgagtttccaactgatatctccttctgcccattccatgttagctccagcaaacatcccaaagattctgtctcctgaaagaaggcagatgtttagttgtaaacatgcacgataacttctagattggtatgtttatggtgatatttgaaatggttattccatacaggtccgcttagtgtgccagttgcaaacatatcccctggtctcagattgcatccattaacagtgtggtgtgctagttgctgtgttaaagtccaatacctgggaaaaaatagttacagtaaggacaaagctaacaaatacatatggtaatgaaacggcaatcggaaaacaggaagcatccttacagatgcttgaagttactctttgcaaccattgatggttcactttgctccttgggcttaatccagaccttacagaaaatgaaatgcagtaataatcatcagtttatgttttaatcaaatatctattaatataaaaatataaaagaagaaatgccatgagaaaatcctacctcaagaggaatatcgtagtttacgtggttcttttcagctaagtaaggcaaaggttcaggttcctgccacgcaaagcaatttaatttatccatagaacaataaaatgatgattctcaaggaaaatatggttaactatatactataatactaagacatgctcacctgcttaggagcttcacaggtgaaaggctttagggcatccatagtaacgatccagggtgatactgtggtacctaaaaatcacaaagtaggaaggaaacatgttacattgacgaaagataaaagcatagtccattgcggaaatcatggaagaatccactcaagtaattgtcgaggccacagtagaaatatgatcatgagcatttgtaaaaactaagcaataaatgtgcaggaaacttttcaacagagagtggtgtattagtgaacatggcataagtataactgaaaaggcatcaggtgtcttactgaaacttttcccaaggaaaggtccaagaggtatagtttcccaagcttggatatctctggctgcaatattatacaaaactcagtttaaccaaagtatgcaactgatctgaacgaaaactgaaaagaatacctaccactccaatcattcattatcattaggccaaagatatgttcttcagcatcattaatatcgataggttttcccaattcattccctggtccaacaatggctgcctgaaagcaacaagccaacaaagcgttatgatatatttgatccaggggaaatgaaaatatctataactaattacatacggccagattttataccacaatgacaaccaacagctcaaatttaacaaacatgcaacaggtatgtcaataacagttcaagaataccaaatactgtgagtcaagaggtttgtaagaaactaaccatctcaagttcaaaatcaagcttcttagaaggaccaaaataaggtcgagaatctcctgttggatggccttgccctctaaaaggcagagaaagaggacattattgacatatcaattggatattatgacaaaaataaaatgtaatatactacacatatgtatccatctacaatacatcactgcatgcaacaaaaagttgaatgcagcaaacatcatcgaatatagtgaattatttgaaagagggcattgagagcaataattaagcaaaatagacacttcagacttcagaggttatgtaaaactagaaacagctacccgctatccaataacactaatatattcaatcattcaaacaatagtaataaaactatctcgtaatctgacaggaatttgataactatccgaatctatgggatgcgtacttgggtcgaatgatgtctgttccagatacaatcacagaggatgcacgaccatgataacctactggaagctgaaacctgatgaagcaaacatacattgcagattagtgtttatgtcaaaacccaagtctcaagtctcagcacaaggcatggtcaagaaaatacattaccaatttgggttgactggggtctgtggcccacggaagatgaacccacaattccttgcatggtgcacagaacaaaagaagtcggtgtagtctcctaccgtgattggcagaagcatctctgtgtcgctctaaatgataaaaacagagaagttagtgatttcataaatggtcatcctgtttctcgtaacaaagaaaagagtagttgatcaagctcaccatgggaacaaggcacttcttcttcaaggcctcgttgtcacgcaaaaccggctcatcagctgcaaagattagagaacccattaaaaaaaagtgtaagtctacctcaggatctcataattcttggatagttttgaacataggcggttaatcgatactttcagttttgaacataggcggttaatcgatactttcttgcatcatgatacattggcacaacatagtactaacaacacaactacaggtagaattactcatcagcatcagaatttggggggcagaagccgcgctactcatcgtgcattactaacagcatagtagactactacaagatattgggaatttgaagtgagcagctaaagtgtgaaacctgagaggatcttctgcagcgtggcgcgcgcctccttccaggccggacgccccatccccaggaacatgttgagcgtttcctgcatgcacacgaaacaaatctaaaaattactactacttgtaaccaccaaaaatcacagtggaatcaaccacccaaatctccaatctccgcgccgcgcaaattgctgctaagcttagctcaccaccagcagatcaaccgcaacacaagacgagtaggtaaggtaaggtaggtaaggtaggcagggtgcggacctggcggaagcagggggaggcggagaggaggggcccgtggaagaggcccgcgtcggagacggcggcgaggtcgagcgcgaagtccccgatggcgacggccgggcgcggcggctccggctccggcgagcccctgcggcggaagaccccgaaggggaggttctggatggggaagtgcgaccccggcgccacctccacgaacgacctcagcggcgaccgcgacccctccgccattgccgactcctctctcgtctcgtgtcgtgtcgtgtcgtgtcgtggcgcagatgaacagtggaagagcgaggcgaggcgaggagaggaggaagaagaggccgcaataaataggcgcagatgaacggaagcggcgccggatactagcacaacgatatgaagtgtcctacactcctactactggtaaaaaagaaaaagaaaaattagctgcgtgatttatccaaaaaaaaaaaaggagccatgtacgatcaggtctctttctatggactctataaagtattaaggctgcgcccccacactcgcaccctttttaaactactaaacggtatatttttttacaaaaaatttctatacgaaagttgcttaaaaaatcatattaatctatttttgaaaaaaattagcaaatacttaattaatcacgtgctaatcgctgctccgttccgaacgcagcctaaagcctcatcgattatccacattttctctaataattttaaacggtttattgagaaatacaaattaattcataggtgaaactttgatatatttgtttgtagctaaaaaggaattacgttgaaaatattttaagatcaactttaaaattaagttcgaaaattcaaactttggtttttttctttagcttattagatcaaccgatgaagctcttactctctccatccaaaagtttagaacttaagtatttctattgccattcattaagactaagaaaaaaagttatcatgcatataagagcaagtttaataagggacttattgtttaggttatgcttatacttatggttataagccaaaattttaattttagaacttgattttgaatttgatctttttgttttctcatcgtagtttattttacaacatttggttttgaattgttaagaacacacaaataaaacttttactcataaatgatttatatttgcaaataagtgattcgaataagcatatgaataagcgaaacaatgggattgtaagtaaagctaactattggttattagttcatattagagctatcatgcataatagattaactataagtttcactttatttttttctctcgctataattttaatgtgatattttggagcatgtgtagaactagcttttgcattagagccaacacccatcatttttctttacctctttcacattagcttatagttggtttatatagcccactattatccttgctctaacaaagatcaagagctatactatgtatgtaaccaatgggcattaaaaatgttgcttgggttccgatcaacaatttaatctagtattgtaaaaagaaaagacaatctcttcatttcagtcttatgtacttaaagtctataaatatgtctattttatttagaaaaactaaacaaatagaatatgtataaaacttttggatggagggagtagtaatagatttaaatgcttttggatatagtcacggtaaaaatatagcaccatattctttaatttgatttcagcttggtttcccccgtgtgatcacttttatgtatgttttgaaactctcctatcttctctttcgagcacataattgattggtttttacaagactaactataatataagtataatataagtattaaaatttacatgtaactatagtgtaaatacatataatttgtaccgtaaaagaattaattatatttggtgccacaaatagagttagcctacatggttatgtttcgatgaaggcatgacgagggtctaaatagagacatggtcttgtaggatttttttttctggtttatctaaaacgtttgtgtggatttttgtggtgtcaaaactcaaaactatccaaggattatgaagcttaatttaaccgtctctaaacttttgaattttaatttaacttcgataaatttacacagtgtcatgtagagccgttgtaaacaaaggattttcctattaataattcggccaaccaatcaaataatagtaggatttttcgcaccgaacgaaaataggtctctccgtctaggaaaagcaaaagctgacgatcgacgatcgagagaaagtaggcgcatattccggttcaagtaaagtaatttacggtacaactgctgtgctcatacttctaggttagttatctctttggtaaaaaaaagctcatcatacatgcatagtgtaataaaaatcacttgagttttttttttcagaaaaggttgaagtacagaagaatggaagtagagttcaattcagataattcttgttgacgcacacgaatacacggtcgttgctactgagaaaaggacacaaagagtagaattcttgttatgctcttgtgcgctagctaggaacacatttatctttttgttaacttattggcaacaaccaaaatttaaaatttacaacactcccttataatatttgacgttggtttgaactagccaacatcttcaaatataacgaaacaaagagggctttttaaaaccatcaatgacaagtttttttttctatgaatcacttttgatcgctacacagatttttttcccactacctgcttaattcaaacggttttgaagaattttaagaatttaactgatttctatgagaatttgtaaaaccttttcgtttaaaaaggggtcatcatgaactgttttagaaggaaaagaaaaacaatttcttctcccatgcttggagagagaaatcgcggctacatgtgagggctcagcacgaatgagtgacgtgccaggttgccaaccgcccggcaccacacgcaccggcgatccgatccatccatccatccagccagccagcctacgtgtccagattcttctagaagatatcatcatccacacaacaaaccaaaccaaaatttccttttagggctcccttcaattggaggatttgcatagaaattttggaggatttaattttctaagaattttttcctatgaaaccctttgattcataggaaagtataggaaattttccttaggattgtattcatatagctcaatttcataggaaaataagcaagaggttcaacctcttgaaaactatcctttgctttgtttgtttcctatggtgctatcaaagggaccctcttcatatttcctgtgttttccattcctgtaggattaggaaaacacgccacttcaattcctacgtttttcctatttctgtgtttttcctatcctgcgtttcaaaagggcccttaaccaaacgagccccagcaacaaactctgatctagtcttgtatggttggcaaggcacgctctatagccaacttcaacttatagcctgttacttcctccgttgcacaacataagtcataatgtgggaaatgctagaatgacttacattgtgaaacggaggaagtaagatggacgtcgttttgaaccatatcattttttcaaaaaaaatgacaaatatatggatgtatttagtttgttaccaaacgttggtaatgcctacagaattttgacaataacacatttaatctattctactgaaatttgataatgttaacttacaaaaattttgtcattgccaaattttgaaaaagtttattttgcatcaatctagcccttaaacacttctgtcatccagtctgcctgttgcaaaatcagtctcaggcattttcagcctcacatgtaaaacaaaattacaaatacatcatctctatgtacgaggtaattcacaatccagcgagacaatatatgaatttatgatttaacttaagataaaattgaaaacaaaaaaaaaaagatactcctccgagtcacaaaattagcaaacacaagaacaatggggcatgccgcacacagggtgaaaaaatgactgaaatctcagcttctgctcagtgcacgcggatggtgcctcccggtgtttgtgcagggaaaaaaaaaatctctgtggatgttcagctacagctcttcaggcaaaacagacagggtgctgttagaaacaactaaggagggcacgagaacagcagcgacgtgttggttccaccaaacccaaaggaattcgagatggcagctcggataggcatcttctttggggaagatagaggcatgaacgcgccttcaaacagcgtgtctggtttttctagattaagtgtcggtggagcgatgccctgaaaatcgaagataaaatgttatgcagagaactcctgaactcaaactgttggtggtcagtaactgtagacaacatacatggtggatggctaatacggtgaagattgcttccactgacccagctgccccaagcagatgaccaattgctccctgaagaatgttgtgccatttgtcgtgaatgggagacgaaggaattgtgatgaattagttgcacatgagtgtgggggctatacctttgttgaggacaatgcaagaccacctgatgttgcatggtcaccaaagacagatttgattgcattagcctctacagcatcacctaattgtggttcaaatcaaaccatcaccttttatcattatagctacagatgacgtagaaccaagaacatggcttataatgaaaaatatatatatgaaaaaacagaagtgctgtcagtccagatgaggcttgtcagtctgactgtgccacttaccaagaggagttgaggtcgcatgtgcattcagataatcgatttgatctgcctgaaggcctgactagaataagaggaagaacattatcagaatgtaccataaatagccatgatgcattttacagttccttaacaacaatgtcaaatttctaaaatgtgccacacaaaaaatcacaaaggtgtatgacattgcacctgatccaaagctcgtttcatggctaaggtagcacctctaccatcattttgtggctgagttatgtggtgtgcgtcacctgaaagagtcattcacaatgaaaggcatcctaacgacagaataaacaaaactctttgtggaataggaggataccagacattccatagcctctcacttctgcataaatttttgccccacgttcttttgcatgatcaagtgcctacagaagagtatatggttaaccctcttaaggtcaaataagatgaactaaatgacactttccagacatagaaaaaaatgcatacacgatagagaaaaagaattagaatattaagggatcaataagtggatatgtgagtcaaactgatcataagacagatcaaagtattaaatggctgatattaaactacactcaaccagaaacttcagaacgaaggtgtaaaataccaacatttttctgaactcacctccaacaccataactccacaaccttcaccaatcctattaattattttgaaacaaagataagaatagccacacatgaaaaaggaaaaaaagaaagggggtatgatttgataaaggatgacatacacaaatccatctctaccacaatcaaatggcctggaagccgcttgaggaagagagttatattttgtagacaatgctcttaatctgaaaaacaaataacatcacaatgaaataagataaggttggccacactaatcagaggagcagacgcaatagggaatagggaacactgaaaaattagagataaagtttgcatatggatatttatggaccatgggtgttttgtgtacatagttggttgaggtcccctattacttcctacagccataatgtgaaaggtataccatataacctaaataaagcattgaaaaaacttacagcatttgcataaagagagcatataaaagagtattatggaacattagtaaaacaaaacaagaacaaagatgcttacctagaaaatccagctatagacaaagcatcaatgctggactctgttccaccagccaccattacatccgcgtctccaaattgaatcatccgtgtagcatcaccaatagagtgggcacctgtggcacaagctgtcacagcagcatggtttggaccctaagtttgaaccattaattatctgaattagcatccatgtacgaaatgaattatagaatgaaaagcctgaactatggcatatgacaattcacctggaaaccatatctcatgctgacatgaccggatgccatgttaatcaaaatcttgggaatgaaatatggactgaggcgacgtagacgctgtgccataataaaaataaatttcaaatttcagtgctgaagttactggaagattgtcgtttacattgcaagtcacctatggcactgcttagcaaaagcataaaagaatgatgacgagtagagagttcagcacgtagaaacacaatagcggtcaagataaatcatctagaaatatagaaatccaactgccatatctgccacaatagctaataataccaatagaaaaaaaaataaaagagtgtggatacaaacattttcaagtatcatctgcgatgcatctaaaatgtctgagatgcttccaatccctccaccgattgagactccctgatacaactccaatcagacaccgcaattcagaaacacataaaaaaaatatatagttcataccaacagcagtttgtaccgttctttccttcttctcatcttctgaaggcaaccaatttgcatctcttaaagcctcatcagctgcacatagagcataggctataaatccggatatagatttattgtcctggaaacaagaaggtcaatcaacagttcaaacatcaaagcatgatacagagtttaaccatatgagctattcagcaccgccattacatgtttacagccatgcaaacaacattctgtcagaatattttggctcctagtaggagaaggaaaaaaatggcagaagtaattctatctacacattttgttccaaactaggacgtgcatatttctataagtatgcaatgaaaatatgagtgggagcacaaattaacaaaaaaaaaaaaggaaaggaaaacattgagaaatcaagacacttgtcactcctggtggcactcaagataaggtcattgccattgtacagcctaccaggaacaacattagtttttgtattatgatgatctatcacattactagcagaaaaatcgtgttggataaagaattatagataacctcaaataggaaaagtggtgctagaggtagtatgggcaatcaatatctatgtacatattggccatgaaatgcggttaaacttatcatcgccacaaaatggggtgaaattatgatgtaaggacagagcaaaagttgcattcctatatatttgcaagacctaaacgttctccaattttagcatccaacaaggcctgaacaaatcactccactcctcagtgcttgaatcccaatgcagcacagaaagcaatctactgcaccaatccaatctcgcattaacaactagtagaagcacattaacaaagcattggaattattagggctaatgaagcaacggtgagtatgataagcaaccttagtccaagcctcctcgtcgaactcggcgtcgcccttcccgcgcggcacgggggcggcgaccctggacgggagctgctccagcgtcctccccgcgtcggctccccccgggaggcgcaggtcctcggcggcgagcgcgcgcaccgcgcagccgccggccacgaggcggtcccaggtgggccccacgccgcggccgagaggggtgacggccccgagccccgtgaccaccacgcggcgccccgcggaggggcgcggcggggggagctcagcctgctccgcggccgccggagccgccgaggaggaggagagcccacggcgtaggccgaggcggagcgcgcggcggaggcagcccatcgcggcggcgccgtcgcaaagccgccggagttcgaagcaaaggcgaagagtggagatgagtcctctcgactgttttccgtttcgagcagtttacagccgctggatgcgtgcatcgaacggctaggatctattgatgtactgcctttcttttattatttttttccctttttcttctttaaatttaaatattgttggggctgaaccaaattacttcactgtgcaaactataatttaccaaccggcaaacatattttacacaatcaaccctcatcttgctataaactttgaggacagtttcaactagcaaatcagcagtggaacaacaatagacacatgcacacaagacacggtgatttacgtggaaaacctcttcggtatgaggagtaaaaaaccatgggaccaacgatgcactccaagcttctgttataaacaataatgggcacaaatggagtcttcactagaacatctaaatgcacatcgcaacatcagctataacatcaagttacacacttgacatcatcaacatcaaccaccaaaactaacaagaggtatatcaacaaacaagcagagaaatagcagatcctttttggttctcaactgagatctcccaaaccacatatgcaaattgcacgaaacttggtacaaatgatggcctatgagtcatttccaagctgtccaaaaaacaacacaattgaacaccatttgacccttcaaactgacattccaccaaatgttgcataatgtaactgtagcaactcgagctgataaaccactactcaaatcaggtactctactcaaccaatccttgcataaactagccagattaaagtgctcaaagtaaggaacaaactcaccaagtttggtgccaattcaatcacgtttgaacctccaatcgctgacttgatgaagatcggataagagctaccaagctgaacaaactgtaacttttcttctctactctccgctctctctctctcttgtgttttgctggttttcttctcgtcctcaatggttgttgttatctcaactctctccatgaaagctagggtttttcttcctatcacaaaggatgtggtaatcttcaccattgatcaaggatatgaatcaatggctcatatttgttagattttcgggctgcaatgggctgagagcaaatgcttatggaggaaaatttggcccaacaaatactagacttacttttttttaagaggaaagtactccctctgttgcaaaatgtttgacaccgttgactttttagcacatgtttgaccgttcgttttattcgaaaaaatttgtgaaatatgtaaaactatatgtgcacatgaaagtatatttaacaatgaatcaaatgatatgaaaagaataaataattacttaaaattttttgaataaaacaaattgtcaaacacgtactaaaaagtcaacggtgtcaaatattttgaaacagagggagtactagacttactagtactgttttttaccactatttctgaacaccgtttggcgcatccaaccattatcataatttcaatttatggcagtaaagacataaacatcttgcctcttcttgatcatattagaatatgagaaagttgagagtttaactcatgaacctatgaacctatgtctcgaatcttaactcatgaaccatcattgtcgacaggtgatgcccgtagaccggatatagagggtattggggtactttggtacaaggatctacgtagtacgacatcaagcgaacaaaagacaagaattatactggttcaggccccttgataggtaatagccctaatccagttgatgtgggattatatggtagaaaacacaggttacaaagggaacaatggaacttgtcgaatccggcgaaatcgtagtcgagttgattcgactagatctcgatggcttggctccttgcaggctccggcttcgtaggttatgtgggttgtgtcggctctgagattcgatcctttaagccctcaccaggggtcccttttatatcacagatctggaggtctccaagtagaactcggagatatcagaccctattcgatacgtcaacgacccaatcttgtccgagtaggattcttcccatccgtagattccgtgaagtatttccatagaatatataggaagtatctgtatgcgcgtgggtataccataccgatatgtaacatatatcgaagggtaaagggtatgcctaacccgtaaccctgacagtagcccccgacttctgcttaaaatgggctcgtgtaaccattcacgacttcgggtgtcgagattgttgtcgttcccggtgcgaggatcgcggagacaggccgtagtcgagcacgccattcaaagcccaacggtcacgagcgaattttaaactgaagtccagaaaaccgccgcgcgtaacggacccagaaatttccggcgggcatctctctctgtccttggaattcgcaccgtcggtagtgcgcctatttaaaggaattttggagatccattttgaagtccgccaaccgtgttgaaaacattccacctgtaagcgctcttcgccttcttcgccgtcacaagaaaccctagttcatcaacctaggccctttctccggcgatcttgaatcagcaatggacctcagcaagtcatcttccaccagtgcgtcgctgaagaagcttcaggaagacggcgtccttcctggccgtggaaccatggagagagaagcaggaggtactaatccccagcccatcttgggtcgcatggttgcgatcgaagattatgttctctgcggtcttctccctccaccttccgagtttcttctcttggttttgaatttctatggtctttctcttctccatttgaaccccaattccattgcctttcttagcatctttgccccatctttgcgaggcctacattggggtagagccttttcttgatctctttcgctcttactatgaactgtgttggatggaatccaacagggtatctggttgcgtcgggttccgacttcaggatggcctgaagtcgcgttatatccccttccagtgcccttcttctcgcagcaaatagcggaataggtggttctaccttgagatcaaagattcgaaccctgtcttcgttgttcccaaagaacaaccggacaagatttcgtcttggaccgcaaagccccccttgaccccttctcttcagccgtttatcgacatcatcgatgatctccgagtacggggcttgtcggggtatgaagtcattgcagacttcgttggtaggcggatccagccactccaggctcgggcctatccagcttataattattccggaccggaggacgcgacccgggtttctcctcggggtatctttctcgcatttatcctgacatgcttatgttcgcgttcctattgactcatcgaaatctggttctcgatttacaggtctgaacagtgaggccgtggagcgccgtgtcggccaggtgatgatcagcggtccgacaacggcgagcaacatccccacgcctctttgtgaaaagggggcggccgagcgtgatgacgctatcaacgtaagtgcacccgataagcatcacgcatttttccttcgagatcaccttatgacttgattaagcgtaggctcttcctctgactgacatcatcgggccactcacagaccatcaggtggcggcgtctctgaaagagaaggtcgccaaggaggcgtatgatgctgctgctgccaccactagcggtggcaatgttgcgacaaaggggaggaagttctcctctgtaagcggacatcgtcgcaagacgccgacaccctcggtaatttatcctgtcgtcagatcgtgcagccagaaggattttgccttactttgcgttgattgtctttcaggcctcggacgcgtcacccccacctccacgacgacaacgtattgtgacgatcggcgagaagtaagtagatgaatttttagatttccgtgattctattcaagcgttgtctgacccatggtcgtcctgtagggaggcgcgggcaaaggctgcgcaagccaagtccggagggacttccagtgcgtcgcctgccgcggcttcgacggatgtcgtgcccgcagccgggagctggaaggcgacgcctagcggcccagtcagcgatcccgcggtaggtcgtgatccaccagctgccgtcctcacctgggaggagctctaagtcaagatggggcgcctcctcgaagcgggtgctcgcggtattggccgcgagattgcggaggcgaggtcggaagcagcgctggcgaacgcacgtgctgaccggctggtgcgcgagttggctggagctcgtgaagacctcacgaagatgagggaattggtggccggcaacgagcgacaacggaagaggctcgaggaccgcatgtcggaactcgggaacaacctatcggagatccagggctcgttgcgggtcacctacactggcctgcaccagctcgccggggagtgcggcatcaagtttacgatcctggtgaatcccgacgagttctcgctgacctcctcccttgcggaactggcgacggcgatgggggagatcccctccaagcatgcagccaggatcgcgaaggagacgtcgaacgggatctacactggggcgtgtcatgtcctcgcgtgtgtaaagctgtcgcgtcctgaactcgatctgcgcgagatcttggatcagggggcggctagtgacacgcggagggaggtgatggaagaagtcggtgatttgggggagtctgttctccccctatttgaagagtaggacttcttgtacttccaagacacaatgtgtaaaacttgaattctaacctccttcgtgcgggcgattatcatcctagtttacttttgtatgttgacctcaggaactcttgtcctttgtagagatgctgatgacgaggatgtctagcagcgcgggcagcccgagtcactggcgataattccagtactcgagtttgaaccacacgtgtcgcccgacaatgtggattagacccttgatacggagacagggataacgacgacttcctcaggttagtagtcccttcaccccttgatgccatcccgactagatcagccatgttctcgaaagaggcgtacagcttgacttagtggttatcacattatgcagatctcgagggtgcccttgctagccaagatcgtcatatccaatactggaagatgaagtttgaagtggcggaactcgagagaaccatgctggccgtgaagaaagagcaggctgtggaaacgctccgaggtcgtgaggtgtggtttaactcgtacttaaagagttgctgcacatccatagccagagtctgtaaagaacttcgagtggtccgcggagatcctgaggagtcggcggccgggtacatctcgtggctgaacggggcctgtgcccaactcgatggcatcggcaagcgtatcgacgaggccttgaagcaggagtgtcgtcgatcgagccgatacgccggagggcacgtgttggcttgcctacgaggtcatcgcccgagcttggacctcgaatttctccgtgagggttttgcttgttctcggaggactccggcggagatagaccatctagcgaggtcgatgtcgccattggccgagaagatcttccagtctatggactagcgttggccttcttggtagttttcgtaccctgtgacaaatatcttaggaaaaagatgtaatgtagcgaaagatttgtgtaaaaactgtaacaagtattgtgtgaaatagtaaagaaatctatctttaacaaatgtctcttactctgaatgtcgtgtgtaagagtgcgttctcagttaacgactttagtcagccgtttgagtcgtacactctccctagcccccagccttgttgtcggagaaattttctcggaggataaggctcttggacctttgacccgccttggttaaataagctctgatcctagcccccaaccgtgaagttggaaagttgatttccgattttacggcttggttaatacgcacggcgagaacacttacatgaccagatcttacatggtctttcgtctctacaggatctgacaaggccttatcggctctgggcgtccccagccgaagatcccttaggttcctcagaggccttttcaagacggcgtaaagggacataaggacaggtttcaacgcgaggtgtcatcagggtaagggatcatcaggcgaaaacactttgattgtaatatgggcctaaaaataggcttcattgatactgtaaggtgtcttacaggtatggatggtattgactcatacatagaatttacgtagttggtcaatgttccaagaatttgctaactcgcgaccgtcgccgtctgcgattttgaatgcgcctggccacaagacttgtgtgatcgtgtaaggtccttcccattttggtgagagtttgtttcgccctgcttggctttgaactcgttggaggacgtagtcgccgatcgaaggtatgcgtgctcggatgcgcttctcgtggtaacggcgaagggcctgttgatagctggctgctcggacggcaacctgttcacgatgctcctcaagaagatttacatcgatgtcccgctgttcctcctggtcctcatcgcagtgcttctgtactcgtgtactctgatgtcgtagctcgccgggaagcatagcctcagagccgtacacaaggaagaagggtgtttccttgttagacgttgtcggtgtggtgcgtacggcccatagtactgatgggagttcttcaacccattttttgtcgtgtgacatgagtctgtcgtagacgcgggtttttatcccttgtagtactatgccgtttgccctctcgacttgtccgttgctttgagggtgagagaccgaggcgaagcatattttgacccctagcccgatgcagtaatcctggaaatcgacgctgatgaactgggagccgttgtcagttatgatgcggtgcggtagtccgtatctgcaaaatatccctttgatgaatttgatggcgttgtcggccttgatttcccccgtgggtactgcttcgatccatttagtgaacttgtcgatcgccacgaataggaatctgtagccgccctgccctcgtgggaatggcccaagtatatctagcccctagcacgagaacggccaagttagagggatagtctggagcgcttgcgcgggtagctttgtgtgtttactgtggaattgacaggcttcgcatcgctagaccatgtcgcatgcatctttaagggcggttggccagaaaaagccttgtcgaaaagctttcccgaccaatgtccgaccggcggcatgtaacccacatatgccttcatgtataccgaggagaaggtgtctgccgtcgtcggtcgagacgcatttgagaagtaccccgtttggcgctttcttgtatagatcgttgccgaccatacagtagatctttgctttacgggttattttctcggcctctgtatcgtcctcaggcaactccttgctgttgacgaatttgattagtgggatgcgccagtcgtctgtggtctcgatgtcggcgacggcacgttctaccttggtgacctctgagctaatgtcgggggtgtccgagctaacttcgccgctaacctctttcactgatggcttcgtcaggatgtcgagaaaagtgccaggctcgagcgattctcgtctggacgcacgtcgtgctaggtcgtctggctcaatgttgtccttgcggtagacgtgtcggacctcgatcccatcgaaccttttctctagtttccttacttctgcaagatacttggataactcggggttagagcatttataatctttgtgcacctggttcgcgactagctcggagtcccctttgacgattagtcgcttgactccaagtgcagctgcagctcttatcccggcaagtagtccttcgtattctgctgtgttattggtcgccctgaagttgaggtggattgcatgcttgaattgatctccggagggagacgtcaagataaatcctacccctgctccttggctgttgagtgcgccatcgaacgtcattgtccatgtttcgttatcaacttggttgtctgatttgttatccggcatagtccaatcggcaacgaaatcggcgagtacctgggacttgatggctgttcgtggcacaaagtggacatcaaactggctcagctcgactacccatttcgcaatgcggccgacaacatctttgtttctcacaacttcgccaagagggaaagaggagacaactgtgactctgtgagcttgaaagtagtggcgtagcttccttgatgtcatgatgaccgcgtaaagtagcttttggatctgtgggtatcttgtctttgcgtcgtggagagcttcgctgacgtaatagactggtcgttgtactttctctctctcgacaacaatgacggtgctaacggaatacggtgtggtggcaatatagaggaataattcttcattaggttggggagcaacaagtacaggggggtttgataggtagcgcttgagtgcaacaaatgcctcttcggcttcctgtgtccatacaaatttgtcttgtttctttagcagagcgaagaaaggttgtcctcgttctcccatcctagcgatgaacctgctcagtgccgtcatgcatccggttagcttttgtacctccttgagtcttgtgggcgacttcatgttcttgattgccttgatcttctcggggtttgcttctattcctttgctagaaacgaggaatccgagcagcttgcccaacggtactccgaacatgcacttctctggattgagcatgaggcgatatcgtcggaggttgtcgaacgtttgccgcagatcggcaatcaatgagtcgcctgtcttggttttgacaacgatgtcgtcgacgtatgcctcgacattgttgccaagctggtcgctaagtgcgccctggaccgtgcgctggaagatattccctgcggttattagtccgaacggcatcttaacgtagcaaaataccctgaacggtgtgatgaatgctgtcttctcttcgtcctcttttgccatgctgatttggtggtagccagagtaagcgtcaaggaagctcaacaactcgcaaccggctgttgaatccaccagttgatctattcgagggagagggaagtgatccttggggcatgccttattgaggtcggtgaagtcaacacacattctccattttccgttggccttccgcaccatgactagattggctagccactctggatgaagtacttctctgatgaagccagctttgagaagtttgtcgagctcttctcgtatggcttgttttcggtctggtgcaaatctccgcagtctttgctttactggcttggcatcgggtcgcaccatgagtttgtgctcaatcacctccctggggacccccggcatgtcggacggctgccaagcgaacacgtcagcattatcggggaggaaggtgatgagcgcgagttcctatttctcgtttagtgtcgccccgatcttgacggtcttgtcagggttggcactggagagtggaacgatcttgatggtgccgtccggtttcggcgtcttgtttgtcttgctcactttcttgggtggctcagtcatggcgggtgggctgggcgtttgctcgaccatgtcgaggctccgcttgtcacactgcactgccagctttgcgttcccttgaatagtgattgttcccttcggtcccggcatcttgagcacttgatacgcgtagtgagatgcggccatgaacttcgcaagtgcagttctcccgatgatggcgttgtaagctgtgtcgaattcagcgacatcaaaggtgatctgctctatttggaagttgttggcttggccgaaagtcacgggcaacgtaatcttgcccaatggttttggggagtaattccgtggaagggttgatcggttggtgtcaactcgctttacggaattcccattgcgtccaaagtgctggcgaaaggaagattgattgagctgccaccgtcgatgaggactcgcgctaccttgatgttccgaatagtgggttcgaccacgatcggatatcgtcctgggatgacggcggtcttggggtggtcttcttccgagaactctatcttctgctcagaccacttcatcttgggtgcagcccgctgccatgtcgaacagacgtcacgttccactttcttgtattctcgctttgaggagtacgttgtggaaccgccgaagatgtgtgaaacgtggaggtcggagtctggatacgctggatccgattcgtgaggaacctcctcctcgttcttctcgaccacgcgtactcgcttgcctttttcaaatgcgatgtgcttctcgagcgattttttgaaaacaaggcaatcttccagagaatgtttgtccgtcttgtgaatggggcaccatgctttctttgtgttgctactttgtgggtctgggcgcttgggagggttcacgtattctgctgcaagaacttccacttgagctttccttttcccatttttgcgatttttctttttgcttgactcagatgcgtccgtggctggtttcttgtctcccccggtcttcggcttatcgttcttgcgtcttagcgcatcatctgcgtgggcgcatcgctcaacaatctcgaacaatctccgagtggttgtgatgcgtcttgtcgccaactcctgtgtagtgtagcgatctctgacaccggatttgaaggcgcgaattacagaagtgtcggtgatttcggggattgtatttctgcactcgttgaagcgccgaacatattccctcagtgattcacccgagttctgagtcaacacgtgtaagtcgtcttcgatcgcgtggcgcttgtatgttccttggaaattggcgacgaactgttgccataggtctgcccacgaagagattgagtagggaggaagatgcatcagccatgaacgtgcaaaacctttcaacgcagttggtaaataatttgccaacgcgttgtcgtctgctccggcagcgtagagtactgtggagtagacttgaaggaactcctctgggccggtgctcccatcatacttttctattgctccaggttggaatctctcaggccatcggacatcacgcagggaacgaccgaaagccctacacccagcgttgggggcggtgggttgtcggcggtcgtgtgtccttcgtggatgtctgtctgatgatgaggaggacgaggatgatgacgatgacgacgggtcgcttggttccggcgtacgattacgaggatgtcggcctggatctcgggaatcctgtcgtcgtctcccactgttgtctcggcgccgatctctgtcatcgtcttcgttatggcgatggcctcgacctgtattgtctggcacccgtcgttcgcgatcgttgtgatcgtggtggttgtcctggtctcggtcctcgtttgagcggtctctttgatttccgttatcatggcgccgtgaagagacatgacgccgagaacgattcacattgtcttgtgtacgtcgtgcctctcggcggccgttgatgtgatctcggagatcgccagtgccgcgaggtggaggggtagctcgttggggtgattcccttcgttctgggtcttcaccattgacatcgccagttggtggctgctccgagtgcgctgcggtagcggcttcttcaaacgcgttgctgaggttggtcactgattcccgtagtcattctgtccaacgctcgaggtcatcgttcagaacgggatcgtagggagtttccctcagtatagcttgaacggccctaatgtgctgggctggagtagtcaattgtcctcccgcttctgcgttggcatgcgctgacgtgccaacgtcatcgatagccaatacctcccgcggcgcactcgttatcgatgacccatagtcttcgagaaggtgtaagactgatgattcgtgaggatcgatatcgattaccccaacaaatcgatctgaagttgaagtcgctccttgttccttgtcgttatccctgatggggacgtatgacttcggagacggagctttcatggcgccaagaaagaccttgcagcttgagaggtcgtgattctttgtcttgtgaataggacaatagacatcacgagttggagaaacacgctgaattccacgctctttgcaggcgcgaatttcagcgcggacgttgaggaaaacctagcaggcttacaaagtgtgtttcctggttttgtggataggacaccaggaccttgtggcttcggaagtcatctttgtcagctcgcgattcatgtcggaagaacaaggtttggccgcatcagaatccttctcgagctcggatgtcgtcgatgctccgttctccgtctcagcgggaggatttttcgacatgaagtcgtcttggtttgtagacactgcgttctcgtttccggtcattgggggaccggttgagatcggcgttgtggtgtaaaccgggaagacgatttcgctgacttgagtccataccagcatcgttaaagcagggtgtacttggctgaggttggtgttgacgccgttgtcgacgaagctggatgacatagtagtagaaccttgagtaccaagtgcccctacctggcgcgccactgtcgataggtgatgcccgtagaccggatatagagggtattggggtacgttggtacaaggatctacgtagtacgacatcaagcgaacaaaagacaagaattatactggttcaggccccttgataggtaatagccctaatccagttgatgtgggattatatggtggaaaacacatgttacaaagggaacaatggaacttgtcgaatccggcgaaatcgtagtcgagttgattcgactagatctcgatggcttggctccttgcaggctccggcttcgtaggctacgtgggttgtgtcggctctgagattcgatcctttaagccctcaccggggggtcccttttatatcacagatctggaggtctccaagtagaacttggagatatcagaccctattcgatacgtcaacgacccaatcttgtccgagtaggattcttcccatccgtagattccgtgaaggatttccatagaatatacaagaagtatctgtatgcgcgtgggtataccatactgatatgtaacatatatcgaagggtaaagggtatgcctaacccgtaaccctgacaatcatcattttttttacccactatattttcttttaaaaaagatttctgaacttgaacaagagctatataagaaaataagctcacacccaccaagttcataatacttattgttttagataagtaaacggtctcgaaaaacaattttgaccactttcctccatcataatataaatagaaatattgtaataatataatttcattgatgtactttttaagactaatatatacatatagtcttcatattttaaaacaaataattttaaaatatttatagttaaaaagtttaaaagggtgtgtttatttcacgccaaattaaattggaagtttgattaaaattggaacgatatgatggaaaagttcgaagtttatgtgtgtagaaaagttttgatgtgatgaaaaagttggaagtttgaagaaaaagttgggagctaatctaggccaaagtttgacattagccaattccaaacgacgagtattatctatgtaaagaaagtagctaattataccagtatatgttaaatggtattgtcattttttctttaacggtaaatgatattgtcgttatccatgatatggatggttgatcgtttttatcaaaaccaaaacccaccatttggaccctgctcgactaactacgacggggaatcggggatgtaggagtgtaggacataacaacggccataggaaagctagtaaagcagtggctgtaaaaaagtcataaccatcgctactgctctttgaaaggttatagaatattctcgattacttttttttttggaatacataaaagagcattgtacacttttgcattaagagaaataaaagttacataaacggcaaacaaagaagagggggggaggggggagggggtggaaaggaaaaaaaggaaagcaaagacttaagtctattctcgtgattacaatgtgacggccgaacgaccaaacacgctaactagaaagtgttggcgatgggggatgggcaagaagccaaagcgctgtctcttgcgacatggctgcgacaacctcaggctaggatcgagaacggttgtttctttccttccaaatggaccaggcaccaagagtcacaatagtgtcgaacccacgacgacgctccctcagaattttgagccggaaagagcagtgccactcatggaaggaatcagcgtcagaggggaagcattgaagaaggccaaggctcgaaaagatagtccaccacagctggagggactcagcgcacctaatcagaatgtaatcgattgtttcttccagttggtcatagaagacacaataggttgggtgcgacagactacgcttctctaaccggtcagccgtccagcagctccgttgagcgacaaaccataggaagtagcgacactgagaggggcaaaaaagcgccagattggtaggtgctaaaatgagatcctgcctgggaagagggcaaggtaagccgaccgggtagagtacgaccccgaactctcccacctctagatgaaagaatcaggatggtcctttgagagagttgttgtctgcaacaacgaccaaatctgcaagtattgcagcattgcctggactcccaaggagccatggagatcgcggatccaacggttgttggccaacgcatcagcgaccaagagctttcggcggacacgcaccgggacgcgatcataaagctcaggtgcctaagagcgaaggctcgaatcctgtagccatctgtcctcctagaagaggatcgacttgatattctcgataatctgcccatttaagtttactgctcaggccatgacatgataaaccaagtggctggagagtggcctttgtatggtagcgaatctatacgagggatgaatctacatatgtgttataaatgtttttaaacctatatgtatattagtgaatctagaccatggacggagaaaacaatacgttatataatatgaaattgaagaagtaattaagtcactagttcaatctcatttcctcagaagaattatccatgaataagtccaacacaactaagatatacacactacatatatgaatgattcagtatgcatccgtcaacatagtacaatatagaaattttctagtacgatgattcttgatatgagatatgctcagattcgtagtaatatgatgtatcacattctgtattgcattgtttgttatattttgggatgtatgtagtagtttatttttttgtttcaatagataaataattcagtagctcagcctcagatgaaatatcagcagatgaggtcagtcagtcccatttccaccacacagcagcagcatccatacatttttctctctttcttttctttctttttatttgttgttgaaaagagcatccaaacatgcacgcatcaacatccacactccacagtgtggctgacgccctgccggtttctgccgcctcacgtcgccgcgagcgccaccacagtagtactagtacactagtacacgagtcctccctccataataataataataataataataataataataataaaaaaaaaaccgagtctccgtgtacaacgtgaccgtccatcttatttgaacggagggagtagcacgcaagagcacagaagccacaaaaaacgagttcgaaagcgaggctgcctttttggcgccatccatggcgctcgctgtcgtgcgcgcgcgcgcgcgccccccggcccttttaacggcagccgcatggtgcgggtagcgcgcgcgcgcatcgcctcgtcggaggaggaggagggagatcggagatgggggcgggggagggaggggaggagcagtcgctggcgctgacgccgacatgggtggtggccggagtctgcttcatcatcgtcgccatctcgctcgccgccgagcgcctcctccaccgcctcggcaaggcaagccaatcttaatttgcttcaattaattacctccccttttatctttgcggctcaaatcagtagtgtttccagttgttcttagttaaaatcctctggtactaagcattcagattcgatgaagaacatcacctgctcattcaaattgatagtatagtatataccatggaatttgctggtaactactccctccacattttaatgtatgacgccattgactttttatccaacgtttgaccattcgtcttattaaaaaaatttatacaattatcatttattttattgtaactcgattcatcatcaaatgtttttttaagcatgatataaatactttcatatttgtacgaaaattttgaataaaacgaatagtcaaacgttagtcaaaaagtcaacggtgtcatacattagaatacagagggagtatctgtcagtgacctggaattgttgttcaagcttgctgcttcacttcccactgcactgcactgtttctcgtatggctttactcatgatgaactcgggcgatacaactgtaggattgaaaaagagagagagagagaggttagattcagatgttagacagctcgaaattgaagtttactctgtaggaagcagagatttagccttgcaaattcctgcagtatattgagccatcactttcttttacagcaataacttcgctcaaaacaagtttgccttttttactaattgttgtatccttgttcatcaggtgctaaaattcaatgggcaagaagcactgttttctgctcttcagagagtcaaagaaggtaatatcatccaagttcttatagttagaatgttagattgctgcctgtacaacaatttatttcttggatacaaaggacaattttcactctgtttctttcacatattactgccagcagaacctgaaaagatgatcttatcgtcaccaaatgataaaataaaatgcttcatgacacgatggccagaacatttcataccagtttacttatgccacaataatttgtgccatttgttcactgcctgatccagcttgttgattacttgtgcagagttgatgcttctgggtttcatttccttcctgcttagcgtcttccaaaaatttatcaatcacatttgcatcccggagagtgctgcacatctcatgcttccatgcattactagagagacgtccgagaccacagaagatgcttccaaactttgcaagcgaaaggtaggatgtgaactatggagagattttcttaaacttttgggaatttttgataaactccaccacgaagtgtccactctggattgtttagctttgttatttttcactaaagaatttgtttcttgtgggtatcttttctttcttgaagagtagaacaaacaagaaactgttatcttcatgaattttttaccagattggtcgttccgaaatcacattcttatgcttctgtagggtgaagttcctatgctatctgaagaggctttgcatcagctgcacatctttatctttgtccttggtattgtccatgttgtattttgtgttacaacattgttacttggtggagccaaggtaaaactatttgtatggataaatatgtgctcctcacggtgcatcagtaaaatcaactcatctatggtaaattctgcagatgaaaaaatgggagaaatgggagaaagaaattcaacaaggaagaaccaaggagcgaccaaagaggccaggctggatgaaattcattgttgtaagatgtgccgtaagtaacccgggccacctattatgcttatcaattactatttgtaactccattattaaatcgtcagttacaatttacaaaggaggatgacaacaagactaaaataggttctctgtttattctgttcttgcctcgctgttccaccaatgatcaattcggatttcaaccgcaccccggccagaaaatcatactactctttagagtagtgttggttaaatgttaccttgaattgataagtaatcatatgctttcctagaacacctaacggtgattcgtttattgtggcatccacttatcatgtaaaaaaagacatccacctctagtgaattttacaaaaaatatttttaaaaaaaaaatcaaacactcaagagtcagaactagaactcaaaaataaaattttactatataagatcatgtaagttaggaattaaatatgtcgataaccagcaaaatataaaagtagagccctcgcgagtaagttgtcataattcataaagtccaaatgtgtgatcaggacacacgcaagctccattgtgataaaggaatagaatacctgtagatggtccattgtcagataaggttaattaaggtacggaaaagctattgacatcaaagatatgaatagcatgggtacaaactgcagcagtactgtattacttttttttcttatttgaggtgtctccctgcaacatggcaatatcatgacgaaacactgatgtgtcttgtactaggacaatgcatactgtctgcatagttattgcagaaattctgtgtctcaaatacaaatttcaacttactttagctatattctaatacagccgattttgttcatacatgatttcagatctcattcttgaagcagttttatgattctgttggtaaacctgattatcaagtacttagatcagcttttgttcaggtcagatgcatctctgagtaacttcagctcaatcataagtgtcattgtactatttttgaagctaataggacataattttttccccagaggcactacccaaaccgtcctgattttgatttccacaagtacatggttcgtgctcttgagcatgattttaaagaagtagttggaatcaggttagtatcttggttaaaatactaactttacttgattaaaaactacatcatctttactgtatctaatgctatgcaattacatgcagctggtacctatggcttttcgttattgtcttcctgctactgaatataaatggtaactcccataaacctaaaaacaagtgccctcatgtaattgtttggataactgaattccatcacactgatatctacttaaattttcttttctttcttttttttcttttttttttgctgggagatatccacttaagttaccatacgacttattctatttctagtaccacaatttagactttaaccacagcatttccagttgacgaacatgatccattttcactcattcagaacaagtcatggatcacaacaacaattgatctgcatcagactgttgaatgcctgaactaggattgtcttttgtcattgaatgaaactatccagtttccatcatctattcaggtggctatcccctaaacttttcatttgcatccaatgcagggtggcacacatacttctggctgtctttcttgcccttaattgtaagtatgaacttcaaacaactcaacatatatgtcaacagtgagcacactcttttcagttttaatgattgaggaattccaacttttggggcacatctgcagctcctactcattgttggcacaaagctggagctcataagcactaggctggcacaagaggcagcagactgcccagatgaagcaacaggaaacccctggacaaagccatgcaaggagcacttctggttcagcaagcctaggattgtcctccatttgatccacttcatcctgttccagaactcctttgagatgggttttttcttctgggttctggtctgttttacagcattacattcttttttttcctgcacttttaatttatcttgcagaaagtactcttatgtcttcatatgggtttctgcaattttaattagtataaaactatggtgctaattaaacaagctggtaaatttcaattgcaggcaacatatgggtttgattcatgcatcatggagaacaagatttatgccctccccagacttgctattgggtcagtactaaaagtctgagctttacatctgatttctgctagaaattgattgcttttctttaattggaatcttaaaaaaaattcaaatatttctgtattaccttctctaaaaaaaaattttagtacatatttctgcactgaattgaattgaactgaacagtaatgtgatgtttctgtcatgaacttttgcagaatcatcgtccaggtgctctgcagctacagcacgctgccgctatacgccatcgttacccacgtaattaacatacaattactctttgctactactccgatccttccattacatattatatcattttgacttttttttaagttaaactttattaagttagattaagtttataaaaaaattaaatacgttttttttaaaaaacttggtcaagcttagtcaaatttaaaaaagtttgataaaaaaaaatcaaacaacttacaatatgaaatagagggagtataataaaaaaattaagtatattatgctttaactgtgactccgatgacgtggggctgacgtcacgctcgccgctgctcagatgggcggggacatcaagctgcaggcgttcggcgagacggtgcacgtgtcggtgcacagctgggcgacggacgtgaggaagaagaaggcggcgccgccgccgcactcccacctccgcatccccttcctcatgaagcgacgccacagcacccgcggcgccgacgacgccgcggacgacgccggcggcgacgtcgaccaccaccaccaccatcacggccaccaccatcacggtcaccaccaccacgaggggagctccgcggcggcggcggcgccggacctggaggagatcgtggcgacgacgtcgggcggcgaggacgggcacccgccggcgccgccgccgccgccgcaaggcccacggccgtagatattatcgtatacggaagcccgagccgccggcggccggtgcccacggcggccggcgtggcgagccggcggcatggagacgtgttgctagctgagtaggtaagctaccttgcgcgacaccgttagaccaatcgctacgtgccacgtgtatggagtttgctgatgagctgtacaaaatggagttaattattaaaattgtacatgcatgcaaacttatggaattggacacatatcatatttttggcatacatgtactcttctgtgttatagtacaattaatgcaaattaaattggatataactctatggcgttagttctacaactttatggcgaagttctgaggaaagctctgatgatgaacctaaacaacctcaaagaaagaagttttacaactagccaagacagaaaaattaattgatttctctacaaattaaaatccacttgtttaatctcttccgtccaagcatatagcacatacatgcatgcacggacgatctcctcttgggtttaatttgttcggaaacctttgcacgcacgaattgtctgtcacatgactaagtttaatttcaatcttaattaagagatagatgattcagtattcagaagcttaattaggagatggttttgttttcatatgcttaattaattaactttctagctgcctccttgttagagtatgcatgataaggaagattgatcatgctctaccataaaagctttagtatacaagatatgtatattggataatgtggatccgacctctgggctctaacacttttattaatttgtctctacgaaaattgtattctttaattagaaacagtatctagctagtagcgaccaagcttattaattaagaaccctacaaaaagatacatatatactagtcatgtatgtttccagttaactaactatatatataagcaccatttgatagccagactctatatgaccaatctgtggttcgtatggtgtgctgcacgactgtttgaaccaattaaatacagctactctgcttgataacaactaaagaatttatgtttgattttgaaaaaaaaaggtactatcaacagccattaattttataaaaatatatacctgcaaaataggagtaagtatgaaaacaaaaggtacaaaaatatgtgtagaaaaaggtagaaaaattatgataactaaatacactcagttaaacctactcacccgaggtgttcgatcaagccctacatattactgcaactaataattctttttagtggtacgtggtacctttgtcaattttatatgtcgatctttcgaaaagtgctatacagtaggttatgtgttttgagaaagaaaacgtagtaattgcatgtgtgtttttgctcgttcagtaagaaatctgcctttaatttgtgctagcttatgctagctggccgatgtgatgttacgtgtgcatgatgcttgcattgctgttggcaactgtgtgtacacgtatgtgtcaagaatggttaaagaaaatggatggatgccaccaaatatgtcatgatcctatcattgacttatgtcatattcggttaatttagtttatactagggcaaatcttttgggtcaaacagtactttgcctttggcctttttggagattttgcatgcgtttttctgctctaattaaccaaactatacgttaaattgtttaggagaaaatcaagcttgcgtatgaaaaattctgcaaaatctccggaagaatatatgagataataattagccctagaacaatgtcacatccctttggccacaaaatatatacgtcagtaattaattttagaacttgtgcaatcaatagatattaattactccctccgttcgaaattgatctacatatagtttttttaggttattcctaaataatctacatatttatgttcattcattaagtctatttgctatttatgcattggattatgcattggagtaaatagacattgatgcatacatccatgcacacaagtatttataacccacatgcaatatcttaatttgctattggctaggaaatagcggggatggtgcatgcatcgagtttgttgctagagtaaatataatatgagataattattagtttttcttaatcttggtgtacttatgaaatatgtagatcaatttggaatggagggagtaactttgacaaaaaaaaatattctaaagtgtatatatttttggacatatggaacgatacacgagtaattaaaattttttttgttcatatatatgtttataataatattacatgtttatacatatttttgaatatataatatacatatcatgatacacagttgagtgatcaaaataggtccgatatattgattttgaaaagtcaaaatcagatttttttttctagaggttgtagatgtgatatatatatccaatgactacagatgacgtatgcattgatcacaaaatcaacaaaatttaaagaaacacacatatatatagctaggaatcacacaaagatattcacaaattaaatttagatagtcatcatcagcaaaaagcctttttcatataatattgtcagcaaatacttagtagttagtcagttatggttaggtaaaaatgtacagctatgctgctgcctgctgatgtgctaaaatcaactaaaagtgatactgacgaaagaatgcaatcaataatgttgatcctttctccgctatttatttattgagcatggataaaagatggtccgtgctttcgatatgcaatttatgatatctaagcagatgatttattactgagagtcatgctatttatgtgctataaattcaagaaccaagacacacatgaataaaatcatttccttagtttgaagtctgaactccatttggtaaggacatgtctaataaattattactgttattaagttcctagccataaaatggtatatatgcagaaacaatgaatttaatggggcacaataattaaattgaagtgtgagctaggataacttcagatttacacaaaaaaaaagtgcttcgatttgtagttaactttgtttctctaaatactactcctaataagaacaactttgggagaaaggttggtacgactggtagactataagtggtcaacctaaagaactttccatgaatggcactgtcttttcgctcttcctttgatccaactagtatgcaattaaacaaagcggccgtaatgcaagaagaatgaaggaaccattaacaaatcctatgtatgtgttaaatatggaatgcagttcaaccaacaaattaagaattcatgcattcaaagatcccaatgcaaaatcaagatagagaaatcaaagtcttcaaaaaaaaaagatagaggaatcatatatccaaaatggagtaaaaatggagtaaaaatggtccgtgtgtgtgagagagagagagagagagagattcatatatccaaaatggagtaaaaataaataatggtcatcttcagagagatgagaggcagcagagaacaagctaagtgagagatttaaggattgcagggtgtgccaccaaaagggggtacttgggcttgagaaatcccatgattttgttagaggggacagggggcaggaattagggttgccattgatgcatgggatcatgccatttcctccatgctctcccaaggacagcttcccagcatatctggggcatagacacactgacacaggacaagaacacaataaaattctccttaattaggcagcaggagacatgattctactattttttgttctcttaatgcagcagctatagcttagctagcacacatttgagaattatactagctagcttagctacacaagagtggtataaatatagtaattaattactagctacagtgtgcaagaatgcactggcctttcgcagcacacaagagtgatcattgttcattacccccctaagtaaaacaaagaccaaccaaattgcattagtttatagctagtggtggccaaagcatgattagttataatacaaacaagcgcatcaaacagcagagagaggaagtgaaatgcaaggataaaatttaaaaatgagcccaatccattgagccacaatagggagatcatcttcattatttgagatcaaagaaaccaattgtatatgcaacatgacctaattttgcaagagcgtgcatgcatgcacaaacccttttaacatagtaattaacacagatctagaaatctagatattatgtagtagtagtagtgtcaaaaccaacaatctataacaactccaccaatatcagatttgggtatcaaagctaaacaaaagtaggagtaactaaaggaaaaaaaaatcaagatttgccaagcaaaaaaaaaatgaaaagaatttggtgctagagctagtggtagaaggaagctggctcaccaagttgaatgcccaaaagatcctctttttcttctcccaacaatggcgccttctcatgcaacgtgtccatcacaaatccaagctcgagttgccatgaaaaatggcaggtagcttagcttagctagctaggatcattgcttgatccctagctagaatgctagatcatcgatacatgaagcactgagactatgatcagttcatccttcgtaagatccaatcttttttttgccaatgcgatcgatggatggagtggggtacctttagcttgagagcaagctagacgccattgatggagctctcgaggtcgaaccgtcgaacaccatggttgatcacttgtgagcttggccattgctatggctgcggctgccacgacgacaccgacatgagcggccgctgctgccaccggaggaagcaggcgccgcggccgccgtcgtcgtcggccttgtacccctccgacgggtagtgcagccgcagcagcagccgcgcctgcgacgcagcgaacgcgctcagcggtcgcggcgcgaggcccgcggcgcgcgcggcggacgcccacgcgtcgaagtcgcgagcgcgcccgccgccgccggcgccgggcgccgccaccgccgcgtcgatctcccggctgaggatctcctgctccaccgccagccggtccgcgctcgccggcggcaccgtggcctccagcgcgtcgaacaccgacgagtagtagtccatcgccgccgccacccgccgcggcagctcgtccgggacgttgtcgtcgtcgacgtcacctccgaggactccttctctctcggcgatggtcaccacggcggggttcatggacttgacccacctgaggaaggcggcgagctcaccgtcgccgccgagcttgtgaaggaacagcacgcagttgacggccagcgtctcgtccgggtgcaactccagggcggcggtcgggtcggcggcgagctcggcggtgcaggggagtatgagggggtggaagcggaaggggaggttgagggagctcgagaaggcgcggaggcggtcgccggtgcggaggagcacgtcgcggtcggtgccggcgccggtgagcctcacctcgggcggcgggccgacggcggggtcggcgcggtcggcgatggcctgcaggagcggcggccactgcacgccgtgcgccgcgtcgaggtcgacgatgtgcagcacgcgccggtgcgcgccgccggcgtccgccgccgccgcctccaggatcgcctggttcgccgtcaggtgcgcgaaccgcaggaacggcgcgatcttgatgtacgccaggtacgccgccgacgacggcaccacgccaccgccgccgccgccatgaccacccttgcctcctccgcggagagcgaggagcgcgcgggcgaagtggtgggcgaggcggtcgccagcctcgccgcgtgggtcggcggcggcgagcacggcttcggcgacgcggcgcgccccgtcgaggtccccccggtggacgaggtcggcgcacgcgagcacgagccccctcgcctcgccgccccccgcgcgcggcgacaatggcggctgcggctgcggctgcggctgctcggaggcctcggcgtcgtcgccgccgcctcgatcgcgagctggtgatgagccgagcatgtcgtgggcgtcagcgtgggcggcatccggacatggcggatcatcgtctgctctgccacagagtagcatcaaacgcacgcacgcacatgcctaagcctagcttagctagtagcctagtaggagcagcttctttcttcttcttcttcttcttcttcttcttcttcttcttcttctaagaacagcagtagaagatgcagcagctagtactagctagaaccagatgagagagagagagaggagaagggtagatgaagaacaagtgtgtttctctctctaaagcttggagaagagaggaggagaggagggtggcaaagtgagcataaactttgcaatttggtggcttttatccagtggacttaatttggtgggggggaatggtcaagaagggtccatcctttttgtgtgaaagagagatttatttacttgcatgagtatctgtctatatctagctaagggctcctttggaagtattttaaaggaattttaaaagctctcaatcttatgaaaaaaattcctatatgtttcttgagataaaagtaatgaccttataaaaattttatgttttttcttaatcggctcaaaacataagaattttagagaaattttaacgtaaggttttttttccatctctcttaagctccatgtaaacagtcgtttttacagatttcctgtattttttcaatccatatgatttaaagtgttagggtgctccaaaatatatttttcctgatacagtgtttttgaaaaacctgtggtccaaagtaaccctaaaattctgaattacacccccttcaggcaattaattttgttgctaagttttatttccctgacaaaattctatcacataaacagtgttcaaaatttttggttctatgaagacacatgcaaaactagcacatcctgacgatttctactgaaatatatccatgtcagtgtacgcagaatagatgaagttatgcatgcaagctcaccatgaacggtgagcgtataagcatatatatatatggacggatctattgactattgtacctagcagggctagtgttagagcaaggataatagtaggctataagcaagctatatgcttatgtggaagagagataaataaaagtggggagtgttggctctcatgcaagagctaactgcacacaaactctaagaaatatgcattaaattcatggtgagagaaagagagaggatgaagaaaataaagataaccttatagccaacctactgtacatgttaactttaacattgactaatataacattgactaatagtaagtagtgagctctactattaaacttgctcttattcagaatatgtacataattaaccctagagctaccctgataaactgctaatttgtagaaaattaacaccatgatgtaagtatgaccaacacgttatgacaccgataaacaccggtgacttttctggttgtttcgttaattttgtggcacaaagtatcccatgtgattatagccatagttattattgataacacgtactagtaaaaaaccaaaagtttttcaaacaccttgacaagttggtcgtgtgtctttagctgatgacaggagacttgaacagtttgagctccattaactacaccccaagtatgtttatgctagaattaatatttatcccctgattagttgtttatggcttctcttaactatgatcatggtaactagctgcacccttgggcctcaattagggtctaataatataaaaggcgtctacaaggctgcaaccaacaaaagatgagatgtatcaacggatcatggtatagagtatagacgcatgcatatggccataagatccttagtaagtctatcatttagactaaatggagtagctagcaacaagtctacaatgcatatattgtctagccaagtacggatgttcaatttcatatatacaaaggaggtagccgaggattatataatgaactaacctaatttacagcttttgggcaccgtttggatggcaggaattgaaatgtctttaaattttgaagattgcaatgaaattcctacgacacaaattgttctaaactttcatgtattttcgtacgtttttccacatttaccctgcaaaaaaataaatgttgctattacacaaacaaatagtccatccttttcaataagatatatatagatgcatgataagatcataaaacaattagataatttgagcttctccattttgcaagaggagtattccattaattttgatactacccgttcttattaatttcttttccccttacgaattatggattagcaggggcatattatacccaaacacttgaagagtaatggactaaaaaaatgaactaaccaacttcaaacatatagggaaggagatagtatgatttttgctgaaactttctatatatatgttcattagaagacttcttttaaacaacatttcaacttggtaatggtaactcattcgtttgaacacccttaaatgttatcacaaaatcagataatccatcctcccaatcagagagagagaaaaaaaaaactaggcttaaccccagatgcaagctataggcccatgtctctctttttgtgtactacgtgagtgtgagggcacacgcaaagcttagcgacgacagggaccagacagccccaacttgtacaatcatctgtctctcctcatgtcccgttctgcatctgcatgcaatggcatctctcatctctctccctctcatatatactcttcctacccctgcctacctccccctcatctaatcccagccgtccatttttcgatccaatgaaagatagacaaacatagatgagccattgagcactcacatcagacaggagtactatcagctagtagtactataggggtatagagagcaatgcaaaatggaataaagttgcagagggaggaggaagaagacgaaccaggaagctgcttggctgctgatcgatcgatggaatgtatcagctcggctctatcatcatcatcatcgccgcctcctctaataactgtgtagtccttgcagctatgtactgtcctcctgtatgcatgcactgcacaccaccgtatcgatcgatcaaagtctcaagcttctttttttatgctagcatatgagcatagtatatccttgcttgcttccactcgcactgcccctgcttcacaaaaaaggttttgcatgcacagctgttacttgttgtcatgcatgcatgcatcatattttaacttgttgtcatgctaggcatctactgctagctaattgttgtctactcttgaagtaaacaagagattgaggaagaaaatattatgagatatatcaagttagttcagcaggcaataattaaggcttctttgaaacacgggattaggaaaatggagaaatagaaaaacacaatattttaataggaataaaagtgtaaaatagagaactacaaaacacataggaaaaataaggaacgaccgtttggttagaccacgtgaaagatgcatgaacttcgaggagagataaagacaaataaaaatttccatgaggttgaacctcattttaaaattcctccaaaacttatatggattgagacattccataggaattacatacgtttcaatattgtttctaatcatttgtttcaaagggccatatatgggaaaaaatcttatacaattggaatcctacaaaaatttctatgtttttccttcacatcaaagaggccctattaatttcatcatagaaacagttcaatttccgcaggactaggaatttttttcttcatgctccaaattggttggtctgttgagatgaagaaccaaaacgaaataaagctagcagaagaagcagctagccaactgtcatgtgtatggataaatgcatctctcttgcaacatattatgtcaagtgtgtgcatgcatgcatgcatgtgcccttaattcttttacctctcgatgataggagtagatcaacttctgtgattttgatgtgttctaaagtccacacaactaatccttgaagtcctatcacaattcacaatatttgctgtctctcagacccctgcacttggccttcaattcttcaacgatacataccttgtagcatgcagcaatatgtccagtcatccagaaagagagaagactcttgagtagagttcaaggaaggaaaaagcccaaagctaagctaggagaggagagcacactcaaaaagacagcatgcatgcatatgggacccgggatgtgcatggtgtcataatgacaaaggttagttggataacaaaaggattatccagaacaggcatgcatgagaacatttaaagtattatagacagataggcatgcatatatagcttgtttcttgttctaaccttatgaccttttgtaatggcttgaattaatctcttctagctctgatatctcttccaatccagccagtggattaaaccacacatattggtgcatcagctccaaatgttatctaggttctgtcagatttgacatgttgttaaaaactgcattagaaggatatgatagagatagttaaagattcaagaagtggaagtcaagttaccttagctataaatatatgccataactttcaattgatatctttgacgatctggatttgacatctctgtgcatgcagatgccaaaacctccaatttcactacagctcgatccaatcagagctaaagatatcatgcaaaagtcaaaaacacacatatttctgatcatacccaagtcactgtagtcaacacaagatagagggaacttatgcatgcattatctgattatgttatctaaagaaatgtaattagcaaataaaagagagatactgagaaggaaaagagaagggaaaggggttaactatgccaaagtttattcttcttcagattttagaagagctcaaggaggaaaagttcctctcaagtactccaaaagtgtgcttttgccttgttccttttattatcttggtcctctcttggaccttctccactgtcaaacgtaggaccacctgtggtcctgtaattattgacaggttaatagttcctccttatgttaagaacaagtttagtacaattgcacaggagataagagagataaaataaatgcatgcaatgtctgtagctacagcaagtctaaatcttctcctttttttttagttttttctgctctaaacaaaactctaataatactcaacataaaattgggagttcatttgacaaagacaaactttctgctacaattagcaaagagaatttcctcttacatatcatcagctagcagtaagggaaatagtaacacatgaacaacaggtggtactgataaaattcaaacaaaaactagtgcgatggatctgaccaatcagctagaactttcatgcaaaaagctgtctaattgcaagggatggatcatggaaggagagtataggtgccagatagtataaaattctctaacaagtgcaggtcatgtcaaatctgtaaaatcatattacagacagcccatgcaatttggtacaatgtggccaggtagaggtgacaaccgattgattgttgtctctgagttgcaattattagtctttttttccatgtctatctatacccgtggcctttctttactactcctaccttcgttcatccttctattccttcccttctgttctagcctgtaaagacatcttggttgtaccaacaataccaagttcacaaaaagtaaaaaatagaatcaacaatcaaatctgttatagatggaaagaccacaacttatattaatacaaaggaatttctggggttaaaagttccagggaaatctaaggcttatttcgaacaactaatgttgccaaaaaagaaagaacaaaatgattcatacagaaacaggaaacataatgtgtatcaagactcaagaggcctctaaaaggttggtactctactgtttacattagttttcactactagagcatgcatatctaaaaactttaatccaaaggagatgctagcataagcagcaatgcagcacattggtggatacaaattgtcggctgagactgtccaaatgtttttatatgtgtacaaagtcaactaacttttgcagttttgaagacaaaaactaaagcagcccaagatcttactctctaaactaatcataaacaaatagcccatgaataagcttctcctgaacttgtcggcctattttctgctagtaaagacgatctggaatcagctttaagacttatcaaagaatgttctgctgatcaaacattttcatatcgtctccaaattgaagcaaacgttttagtagtacaattttccaacaggattgccaaacaggggaacatgattagggctgggtcatatcatatggcccacagagcatagctcaatgagaatgtgggacagtctttctgttctacatcttctccttaagcacaaagaattgctttaaaaaaaagatagatcagcaagtgttccaagatgtacaaaaggtgtgttttaagttcatagaacatgcatgatgcatctagagaacattgcaaacaaactgagcaaagatcaatgcattgcaaacaatacattgtaaggaaagaataagaactgaaataacagtagacgcgaaataagcatttattttcagaaaaacaacgtgatacctaatgcgcgtagtagataaagaccgtatttgtacatccaacagagtgaaattgagatttggaccaacagttggctgtgtagagttggcagatattatatgctaagtggcttaggtggaagtggaacaccaaaagacaatgacctgtgtaagattagattgcaactaactaggggcacctatacagtaatcaacagaatatgctatatgattaagcccaggccacccatcactgctaaaagcacaagaagttggaatttatgcaagaaatggactagcagattgttaaagtacatccctacctgtagccaccatctatctaaatgtgcatagagaagataaaaacatcataaacaatacttaaaatggtcccaggagaataggaaggctatggctatgaaaacgttcaaacaacagaatctatcctttcctccagccccacaagcaaaaggggttgtagtgctgtacatactgcatacattgaactcctgagcaaagcactaagctttataccttcaacttgttcttttttccatccactaactgcataatttatcaacccctatatgctattagtgaccaaagcaaaaaatcgcaaagatgctcaaccaaacaaccaattagggttttggtaacttccttccatagattcccctatccccctaaaccttttctcaattagttaatcttttcggtcctcattgtaaacgtatcaatcattcttgaactttttatattctgtgcccgatcttgatgtgctcaccttggggataatttacagaaaaggttagcatgtttaataggaattatcttgtggcccaatgcaagtagatcatgctcaggatgctctgcatcaagctgattgcgacattaaactttgtggggttcactaataaaaagcaaaaaaagggggggaaggctggaaaagaacagcactaacagcatctggaagggtggagtgctcataattaaccaccatcatcatggattttattagaaggcatcttgtgattatgtggcttctaagatacactaaagtagaatcaactaaggtggatttggctctatcaacaggtgctaaacttcttcctctaaatctaaagttttgttctgtaaatccatatggaatttcatgccagtttgacggtagaggacaaagattatgacaaaaaaaggcatctggaattgtatagtcaaacaaataacatacatgccagattatctgatggtcaattaaattcatgatgttgacgcttggtagaataaaccagtatcatgtgacataaagtatttttcaggattattgatggcaagagaagaatgatgggttcttgcatcacaattcagcaaccgcattctttagtgggctctgcgcgtggaagatacctcgcatttttgacgtttcatacttagtataaggtggcacctagttgatcattaggtctacaatatagcatatattaagttaacacttgcctttcagttaaagttaaaaacggaggcatcaaagaaaagcaaaagacaacaagagttccaagtcttctctcagtgattaataaagaagtgctatgtgaaattcctctgcattctgctgagagattaaaatttaaaagaagcagggaatgttagcaacgattctgtcttgtctaaccattaccaagccccagtattttctcctgtagtattacctaagttttgatatggtaaaagaaaatttagtgatgtaaatcttgatatggcaaaagcaaataatgtgatatcactataagcatttagcagattccataaatcatattttgtgctgcgcctctgcgggcagcaccccagccatctatctacctccatagatgtacacccactaatttccttcaagatgcttctcaattttgacaaaactgaatatagaagcaatcaatcaatgcctatcttaccaaaaagtacacaagaaaaagaatataacaacatgagccttctttttagatccactgaccctctaatcgaattttaattcgagtataaaatcaaattcatctgcttaaaagtcataaaggtggtatacatcaatgcaacttgatgtcataagcttttaggtgaaaacatgatgtctgcaagaaataaaaacatataaagaatgtttacatgtgtatctgttgagactttttaaattgttagtcattaatttctgatgttttcttccataactgctgacaaagtgacagttatttttaaatgtatttacttatactcttccttgtaacttctataactcgcagaaacattggtttctatcctatggaagcaggagcatattttgcttctcttctgttacaagttttactaaatgcaacgaaacatcaatattcagaagactgaaaattatgctgagaattaatctgccacatggggtataatatcaatatgcaaccataaataaaggattgggaaaaagaaaagggacttgcacaaaaacaatggcttactgcctcaacaaaaacatcaaacttaatgtttcaattaaaacaggagaaaatagaagctgcatgttcaatgcatcatctaataatttgtttttttactattaccttagaatcacatggttatagtaagcatttttttttatagatgaggccacattgataacttccagtcccgatgaactggttcactatgaaggtaagttctcagctgtgcccagtagaataaatctaagcaataacaatgtgataaattgaattctgttttcaggttcatgtctaatactacctaccactcaccaaaagaataactgcctaaagaaaagcaacgcaactaaaataattaacagactcatttctagccactgaggccgtaaaagctatcgatgctattattcttcaatctgtgaacatcacaacaaattagataactattatcactgtatctgcatcaaataaaaaatagataccacaaaactaaactatgtccatgagaaacttatttcttaagtagtccatggaatcatttacagcaatttgatggactgaattttgcaaaaaaattatactatatgaatcttcaattagtgcactgatggaattatccatgaacactcatacttcactgttgtcatctgaatgactgaacatggttgtgcacagctatagatgtttttcttacatgacgtttcattcacatggaacattcgtgaagagtttacaagtctagaatgatatatataagagctcgaagaaacccagctgagttcaagcttaacaagtgaatctaagaatgattagatatggaactgttatcaatgttcaatcagggtcagaactaaagtctgagcaaaagattagatctaacgcaaacaagtgaaaggaaaagctaaactaccgttgccacatagcactgcatcattcgattctcatcttgtttgaactttgaaatctgaaatgcacataactaaatatgcaaatatacaaactttaaataccatttgcaggccagactgattcatttatccaaaaaggatatcctaatcagtaaccactaaaactatgcttaagagaatcagaaggagagcaaaactgatgacaatctacatatgatggacataggattttttttcaagttcaatgatccggtctaacctctgagtaagagcctgctaagttcagaattgacaatgctggtccagaaacttaaaagttgagcgagagaagggggcatatgtatgggcacaagaatatgattaagtggttgcaagaactaattttcccactcaccctccaaagatattctttaaagttgtctgtcacagtttaccttcccaactatatgaagaataataaactggatggagaataaaaaatcagcatggcaggcataccacctgatcactatcaaccggaattacctacacaacaagtttctgcttatcttgcccatatccaggagtacatcatataaatctttacatggatctaaattgattaaaaaaaacataaccaaggttcaggagagaactttgcagtgctgcgaatggccaataaaatgaaacctaagttactaataaaccaattaaagtaaggagccaaaattactaaaagaaaagagaacaaacagatgacattcatttcggccatcatttctggctcccatatcgcaaattgtaatccagttatcgcaatgacaaagggggcaattactagtacattattattgcgaaaatttcatgaaacaagaaacaaggtaagcaaaaatataactcgtttcgagctcgaacagagaggccgtctctacacaggccgggatcacctctccagcacacagcgaagtcacacgtcctctccggcgccggcgccgtcgagggccttgagcccctcggccaccgcccgcgcgcggttctgcgcctgcctctccaccgccacgtagtacaggcctgcacacgcggcgacgccgccggatcaaaccactgcgattaggcggcggcggcggcggcggaatacgctactaggggtctagggtttcaggtcggggtgcttactcacggcgctgccgatggcgcagagccagaggacgcgctgcgaccacctctcccccaccacgcctcgccccccgagccccatcccgccgccgccgccgccgctgccgccgacgattgatcgcgcgagctgcgccgccgctccgttcgccgtgcgggccgcagcctccgagtccagtgaccgacaagtgggacccacctcccggaaacctatttgggattgacggtttgttgggctgggcccaagagctgacgacaaatggcccaattatagcccaaagcataataagcccattttcgatgcgatcgagcctaaatgagcctagattaggccattagggagcagcacggcttcattagcaatgttgaattaggtcctctttggcatagcccggatccaagatttcttaaagctaaatatttgtaacttcacatgtccatggatttaaatctataattatgttgataacatttgaacaaatcattttgtttccattttttgtgaaatttaatattttaaaccacggtacaaaattcaaatcttttgagctatgccaaacaggaccttacactcagcttcaaccctccgcagcaaaatgaaataattattagtgtatggttaattaagcattagataaaataaacttttaaaaatagattaatatgttttttaaaaaaaaaagttgttttctatatatattttttttaaaaaaaacgtaccgtttagccgcatgaaacgagcgagtagaagttgaaaagatgtggtaaagaacacatccttacgctctttgttcacttcaaactctgtgcacttccacatggaattcaataattcaaacagaatgaaaatttcaccaagattttgccggaggatattgttcaccacacaaaacttattacaaggagttttgagttttcaaagacctcaaatcccagggaatagggtaagctttggcatagaacataagtaccgagtctacaactacagatggaagaaaatgaacttttcacacacaaagatgctctataagaggaggtttgagaatgcacactggcactggcgtctgactagcttttgctatcttcattctgttaactctttcaaggggaatgtgatgtcaaactagctggaagaaacacatctgaatttcatggttccaagcatatcgagtaacatcgcctgtttgttttaaagatcgtatccagtagatggacaatgacaacctctccactgacaacggcaagaatcaaaggactttcggtggtgaagaaaaccccagcctactcagcaaccaatagaagagtatggtccatcccagcagcaacctgtgaaacctctgctccttccagggtatcgatgaggaaaggctcaggctcatccatcgagcttcccaaacctagcctgccgtttcggccagatccccatgcccaaacctctccctttgatgtgagagcaaccgaatgaactcgaccagccgaggccgacactggcctctctccattcagaccgtcgactagtgcaggcacgtcttctttgccaggtcgtccaagctgggagctgcagttccatccccatgagaggacgccggtctcggcatggtcatcgccttcagttgatatgatgcatgttgcaagagagtggccaacacttgctgacacagagaatggactgtggctaatgtcgacaggaagaaatttggaccatgctgatttcctgccaagctgtccgtaagtgttgtctccaccgctcagtacgatgccatcagctgaagtaatacagaaacacatcagcaagcagtactgtaacttatgttggtaggaatttgaactatgacatcccaaaaaacctaatgtttttttcatgagagatgataattattgctgaaagtttattgttcaaaccaaatactatcaattactacaatggtccagccagcgccaggctttctatgttaatagagctaaacataaccatgtaagaattgtaaaaagggaatatatgtgataggataaccaacaacagacacttatatttactattgatatttcttaaccagcgcggccatttcctagtctgaactcttactaagacagacaaatgccatatatacaagtatgcaacaatgaaccatggcttactaacagtactactgcaagatgtatgagacagaaaattgtccataggaagtgcacacaaaaaagaggttcagtttgtagttaaaagaagtaaagaagactcacagcagagaaccagagaatgatcgagcccacatgacacatcagacacctcaacatgacacacttcatgaacaagcgaaggttcccagatgatgggcatattgtcttcactccttattttttcctcaaccatcttttcaacggcctctagcattgagctagagtacttgtcaactgtttttccaagtaattctttggcagaagaagcctgagtaatatggccaatttctcctaaccttccgttttctgaatatccccagccaagtaaccctccatcctttgtcaatgccatagcatgtccccaaccaaatgatacctagcatcattccttcaattaacaacttttttctcacaagggagcaaacatccgactacttaatttcagggagaaagttagaaccttgacaatatcataattagcaagtgcttccactctagaaggtactgcagcctctacaatgtcctttccaagcccaagttggccacgctttgatctcccccaaacccataaagagccatcacacccaattgctgctgaaacaaccccacaagcagatacagctcggacttgaacattttccaatcctctcactttttcaggcttgctccaagtattcctgtcagtcagcaaaatggtgcatcagcctcccaaaagaagtttattttctcagaattaaaacatttgcaaatatttgttaagtaaccatgtgcaagaaaaaaaaactaattgtttcgagctataggttaactcatgccatcattggcttattgttcattcaaatctagcatggaaaacgaaaacacgattgtttcatacatatattatcagtattggaggtttgaattccaaccaataagaatcagatatacgatataccatgtcctgatttcaatctactcacatatcaaactgaaaccagcaaaggacgcttgtacatctactcacatatcaaactgaaaccagcaaaggacgcatgtgcaaacgccaggtagtgggcaggtaattacacccatcttataccacttcttcatttactccattgttactaaataagcacatatcatggtttctgatttgtttggtccattgttactaaataagcacagatcatggtttctgatttgtttggtctaggaaagccactttgctgctgatctgaggctaaacaatccaccgccgtgccttataatgtctccactccactatagaatacgagaattttcctaccccaaagaggatcaaactgttcgaacgctgggaatacttgtgcgtggatgagaaatcgagaatcgaggatatgagctagatcgatcatcacctcggggcgtggtgcccgcggccgagctgaccttcatcgttgcggccccacgcccagacctccccttcggcggaaaccgcgagggagtggtagtgcccggcggcgacggcggcgacggacgtcgggagggagggcacgggcgtggggacgtagacgtcggcggccggcgccggctgccccgccgcgccgtggctgttgtccccgaaggcgtacacggccccgacgcgcgggagtggcgcgccgttcccggcgagctcggagaggaggcggcggcggaggaagccggaggcggaggcggccgtgcggcggagaggacgcatttggaactcgagagaggaggaggggaatgggtgggtttgtttcatgtggacctcaaaaatgggccttgtgggttgtggcccatgtccaaatcatgtaattttgggccagcctagtaaagcatctctcaggccttcatcactattccaatccaaacggtccacaagattttatatttctatttcttttggaataccagatttttttttctagacaagattattttatgtggtgcaattaaatctcctctagttttcttccggaaaaatttttttcctctttactgtcagggataaacatacttctaagaaacatcttacatagcgtagcatgtggatgacaataatttaaaaacggagaaaataaaatacacgggacactcctagttctaccgcctaataaaagggagatatttaactatttaccacgtttataagtgttaattaaaaatttatcactggaactttgagtgacaaacttttaatcaacaaaagtagtaaatagttatatgcccaacaaaagagagacaagctagcaaatcgatccatgcgaccatgcgtgcaaatcagttggagcacaaatttacatgttacacccacaccctacacccatgcataataatacatcgtatatacgtacgtacatacatacccctctcgatcacacgcaccatcgatcgtacaaagttgcgtacatacatacgtacacacatatacgcatacgcacgtacatacatacataattaaaaactcgtaattaattaaatacgtagttgatggcatctctaatggaacttgaggctggtgaggatgttgttgtggacgggatcagcgaggtgatcaagcaggttctgcacggggccaaccccggtgaagagcgcctggacggagaagccgaggaaggcgagcatggcgagcctgccattcttgatctccttgagcttgagctccttcatctccgcctcgctcttggtcccgaagccgagcgggttgaagagcgggccgccggggtaggccggctcgccggagccggcgaggtacttctcgaggccgaggaagtactgcttccccatggagcccggcgtgtaccagtcctggaagcggcggtgctcggcgaagccgacgagggcgagctcgaagacgaagagagtgtaagggtcggcccagtaggtgtaggtgcccgcgggggggatcacgccggtctggaaccacgggatcgccgtctcggcggggacgaggcccagcttgccgaggagctccggggcgaccatgccgacgacgcccatcatcgccgtccggccgttgaacacctcgccgtaggccagccaccgtggctcgatgaacccaccggtcccctccgggtccgatagccccagcgggtcgaacccgaagtctcccggaagcctgcatccatccatgattccatgcacgcacgatcaatattatggaagccatggcatatttacaaacgagatataatttgtgaataaaaactttagaagcaaaggctgaaaaataaacttcgataaaaaaaacatgaaaattagctctaaatttaagattaaaaatttaaagtttcgctgataaggataagcataaacgaaaagatgaggtccgtagacgataaatcatgcggttatgtgccacaggtcatctttgaccataaaagtaaaggttctctgaaatttactctttatttatttatttatttggaaggtctattgattattgtttcctatgaaaagtttgatcattttgattgtactactgtactatgaaattcagttggatacggctagttcctaccatcttaattaagctcctttttttttttttgaaacgcatgaattttacggttgattcctataaaaattcttcgaaaatcgtttcaaatgaggccttaacgcctcttttattgcaacatgaataaattttaccacatgaaaacttacgtgccatccaggtagctcagggactgcttggatgcgaaccacagctgcctgtcagcaccttgctgaaaccaaaccaaaccaaacataaatttaaccagatcagcataatatctttcaattttgaattgaggaagagtagaaatcaatcagcatatataccttggcagggggagtggcctctgccctgaccatgaagggtgccttcctggaggaagaagacctggagactgaagattgcaatggcctccccagcagctgcctcccagagagaagagcctgagccgccattgttgtctctctccaagctcaagctcctcctcctcttcccaagctagcagtggtgagctgaaatgtgtgctccaaattaaacttggtgagtgctagaaaagggggatgaggggaacacaaggttgcaggggtgctgtgcttgtggccatggaaaaggggtgggcccggggaaatctaattctggtgtgaggtggcatcttagcagatgagggcatcagtggacccagtaggagtgtgccacgtggcaggggggcaggtgagataagggagctgcctctcagtggcttaccagctgccagcacagcatgcagctgaggtttgcatttcctgcatctgtgcatggtgtgttcttggattgttggcatttgctgagatttttttgtttaggctttgtggatagcacagattggtgttgtttctatcctgcatttgtgatggaactagtgccagttattcagccaaaaaaattgacaaaatgatatgacatgagatattaatcaatcttaaaaccaaaaaaagaaaagaaaaaaggaaacaatatatcatggagtcatggttggtcatcaggtcatgtaggaagtaaacagtgtaaaactactattcattgaaaaacacaatatcttggcagtttgtacattttgtgcatcaagtacaacagtgagagatgagagcgaatttcacagggtgaaaaacaagacaatctcggtacacgtgttcggtttgagagtttttaccactgaactgcacatatgtagttttacattctgacgaaaacaaactaacattcattctacgagtagcccatttcgattctctatcagaaaggaaggaagcacaatgccgatagctgccaagacttgcgtgaaatttggtcagttccagaagcgtccccttcacataaaaatgggtcttctgtaaacaagtactacctcgctctcagactcagtatcatttacctggtagataaaaagggttggtatcaatcattcaagctaagcgctatgtacaaatgaagagccaaaaaatgctactccctccgtttcacaatgtaagtcattctagccttttccacattcatattgatgttaatgagtttagatagatacatatgtctagatacatcaatatgaatgtggaaaatgctagaatgacttacattgtgaaacggaggaagtacttttatgaggatttaactgatagttaaatacatcgaaactgtagtggaaaataaccaagagtgaaatgcctcctacaaaatggtattagaattaagaacttccaatgcagccatattacggcaaacatagcctacggaaatgctgcggacaaaacatttgtcattcagaacatgagagttaaacaccttctacggagtatatgtctatttatcgaacaaggccagcagaaatatagcgactaaaacatgagccactgagaatatttacatcatgttttcttctgcaagcattttacaaaacaaaagccaaatgctacataacattttgcgatagctgaagtcatttcagtaaggggctaacggcagaaaattttctactctatacagtgccaaactgccaatatgaaaaaaaaaagacttaccataattttgatatttacgtgagaaccgatataaagctttcacaatggtaccatatttcattgattccagtggacccacgtacctatacaatagaaatttagatatttccaattgtgaaataaaataagcatattattaataagtaatgtgtgatgataaacataagaaagatagcaacaccgtcaaccataaggtggaaaattttgcatgtaatgggtgcaaggaaaatctgtttatcatgaaaacttctacatactatataatttgggtgggggtcttacataatctctgtgtaccgtaatctccatgcaggaaatcccaaatgaaatctaccaggaccatacacaaggagaagatcaggttctggcccaccagtacctaatgaaaaggctggaacagtaagcgttcatctggcattctgatgttagaaatgcctcggaaatgctaaaagaatatgaaaaataaaacaagaatggaaagaataaatgcattcttctcaaacatacctacagctttcagtgcatgagtcatgtcagcttctgtaaacgcaatctcacttttgttatcagagttgcagcaagtggaatacagtaagtttgctactttggcgatggcttccttgccatcagagctagatagacactccataaacatccctccatgtctatagcatgaagctttggtatctgcaactacatcctacgactccatatgaatgatacaaattatgaagtgatggatagataagaagaataataggcaccaatcattggaatacatgctttagacagcaaatggatcaacaggaagctgaactcagcaacttactaaagaatttattgggttcccatctgttgaggtttctataccaggttgaatcaactcctttagtactcctgtagagaattgtgaaaatggttatataaatctttctgcagtgcacattgtacattcattaatgcagtgctaaaacgagctgagaagtataatgggaaacgcaatggtcatcatttaaagccatgccattttcctgtttagctagatgtaatggttccgtcctgattttcctttcattttttttggggcatgtaacagataatttaaattattagaagtattcttatgcaaaaaaatgtaatttgaaagctattgttcctacagtacagatttacaatctacattacggaaaaagtagtacaagtgaaaacttgaaggggcaaatatttaactaaagcaatcaaactcattatacctctacattgctgctaaagtgatttcatttcacatcaccagatttaggaaagaaaatcgttattggtcaaggataggtaaaacaagatgatactagatactcatgaagaagcatgtatgggatatgtttgtgatcacaccttcaatgtcatagagaattagataattaatcccaatagttgagaaccagcgtaaaagttgcttgaccttcaaagcattctttgcctctctgctatctactacaacacccaagtatgcaagtctctcaagatgtagatttcggtacttgggcaacaacttgaatgaaatgagatagcattctagatcattcttcagatgtgacaatgaaccaaagaagctgatcaccaagtggacaaggcaccacagcaaccctaagatgagctttaaaatcataggtgaataagatatctgcattggtgaaacataaatgatcaacatatctggataggagaagatagaaacataactttgttggtaaacttcccctgaaagttaacatgaaaaggctagcaacattgtcttgtattatacatatatcaattacaataggatcaacagaacatgtgggtcatgctcccaagatctatgtaaggggggaatatatatctagctgtgtcaattagccatgtttgtaatgtactcataattgatgtcaagcaggcccgatctacttaaagcatgtttgctgttaaactcctcaacacatacaggttacctgattggagaaggctactgtaggttgttggactatgttggctgtagcaacattaaggctgggctgtgccaggtttttctttcactactgcacaaaaattacaacaaaaaattctcaataggcgatccaaaggtccatactatacaagcccacccagggcaaagttcataaattacataaagagaacaggccaaagatgcttttctcttgacatagctcaacatgctactggcgtgcctcctatcagctgaaaatggtacagagaaagcctcatgttctcttaacaaagtttgcaatcataaaagaattcaagacatgctctcctccccatgttgttattcgcaggatttgggttttcaatgtacactgaattacaagaactaaacatctgatgaagtctaagaatagcatggtgccagtttggaagcttaacattttccaggaccttgagtcattgactagttctgccatggcatgatgtccacagccactaatcttaaaactcctaattagtgtcctatcatgtggatccattatctaaaaaagtgctatcatgatcattagtccattacatgatcgaatgcaacacaagctgcatgcgacaggaaccgacaactaatgtccaaaccaattaaccatactagccaaacttcaaagatagtataacttacccacgaaaagctatcttgaggagctaatgatcctaaagccttaaatagttaaattgctatctaagagacggctatctatgcccagcgaaggcaaaatttagctcatcattcaagaccattcaacattaatgcatggaagaagctaaaacttttttttttttgctgactctactttgctgcccccatttactcaccttctgctctcgaattcttctcacagtaaaagaacaaaccccccgctactgtcccagcaaaccagaccagccatggcgtacctgaaccaggagcggaggaaggtatcgccggcagagcagaaatgccgcctccggcagccctgccctacagctcacagctacgacgtggagtgagatcgatcagcgaggaagcaggattcaccggctccagggttccggtcactggaggaagaagaagacctctcgcctggcgctggcgcggagacagttagcgtggcgccggtgaggggcaggaggcgccggcggcgagggacaccggagatggggacggggaggaggcgaggtgtgcaggctggagcaatggacttcgagcttgggctggatgggcctctcgtgggctggggtggacgcccaatctcaaaatctcaatgttgccaaacttaaacgcgcttaacaacttttaaccatataaatctcgataagtgcatgtctaaatgtttaaggactagtttaatcttaaagaaattttagaaactagtttaatcttaaaagaaattttagaaattacaacaaaaattttgacactctgtttatcaaaaaatcaaaaatttgtgataaagaaaattgtcagttaggtggtttttgcttacgtgatgctttttttccctagaaattcttgttggaaaaaaactcctgacgcttagttgattccaatatattggagttttggaaaaaaatttgaaaaattgtcgttggagcactctaacaagagtatagctcgctctaataggcacaaattccatgggcgtggttcttctttgtttcgaaagataaacccggtttattcaggatccctttgtccaaatgacacaaccaacaatagtcgggtggattacaggtcggattgtcctgacgtcctcaaactgccaattgccagtaaactaggattgtcgccgcccttgagtgttagtggaactagcagaggatggggcttgcggacgtagtcctgcgcagccgatggaaggagtttgtggcaacggcatggctctcctccctgcatgtttagctccagcgaactccgtcttcccgcatggtctaccccaagctcccgttcgccggccaacccccattccttcacactaatgtttgtcattgacgtcacgtcaccggactcatggtccttagttcctcacctagcacatcgtcaagttcctccatcgtcgacgtcgacttgtgaagatccatatatgctcagtatcctcgagcttcagatgtgcgatgaacatcgccgccgagcttcatccttaagctctatcatgctacatccattgtatgcgccggtagaaagagacaacaaagatagcgtgggaaggaagatggtgttgacaaatgaagttcactgttttttatgttttaaaaagttgattcgactaccatataaatagcacgtaatcaaagccacctcgatcttgtagagggtataagctgaacggtttagatacccatagaggggttagtatccagttttgaagattagaggtgagcgttagacaaacgcaatagttaagatgggtcaatgaacttacggctctatcttttcgcttatgcttatacttattagccaaaatttgaatttttaaccttaaatttggtgttgattttgggggtttttttatcgaaatttattttttagcctttagttttaggttgctaagaacacgtatataatttttttttcacaaattaattttagcaaaatgatggtaccttatccgagtatttatgagagtcagatagatcgatatgtgtgcagcgtggacctcactgtagagtgtaaccgcaaaatataccgtggttttaaaaattagaaatgttaccatgcatggtaactacgataaccgtgtggttttgtaagtacttccatctcgccacctttctctctttcatctctcttcccgagctatggcctacggccagcgtgagcttgtgactttgcctctccattcatctgactttgacgagattgggcccttttttgccatggctgtgaatgagaaccgcagaatccttgttcgagaaagagagtaaaatcgatacatcatatgcacagaccagccagctgtcgatcggcaaatggcccgatccacaaacttcaatccgagcaagcacacccgtccttggaaaatgactcctcctaattacatgcaaatcaccatgctttattaattactaattacatgctttaaacgtaattagcgcgcatgcaacaaacgaagagatcgaagcaaagtgatggatgatcgatcactcgaggggatcgccgccgtcggccttgtgcacggtgacgctgagcacgtggtcgccgtcgccgtcgtcgacgtcgccggcgccggagccggcggagcggagcgcgcggaagaagcaggtgtcgccgacggcgaggccgttgtcggcgcagaaccggtgccagccgtaccggagcaccgcgcgctcgcggcgcggccgcctgcccttggtgtgcttcagcctcaccgtccacgacctcccccgcatccgcagcaccaccttctcccgcgccgcgtacccgtgcgcctcctggaactctaccggcacgttctttgagattgatcgagaggtttagcaacaacaataagacagtggaaggcaactcgatcaaaatggtggcatagggtgggtgtgctgaacaaagcgcctgatcatctcatgcctcctacgaagttcacttcgtgaaatgaagtgaagaagaagaagaagaagaagaagaagaagaagaagaagaagaagaagaagaagaaaggcttcaagctagctggagacctgcagttttgtgcacaacggttggtcatattgggagatggacttttgaaacagatactgctcattccgttttatattataaagcgttttgattttttttaaaatttaaacttttttaagtttgattaaattcgtaaaaaaaatatagtaacaaacctaaagaattttgatttaaaaaatcaaaacaaattgtaatatgagatggatggagagcatatgacatttcttcgccgatctagaaaagaaacaatgccccatctcatcatagggccccgttctcaagaagcactcgcattggcctggccagaattagcatgacatcactattatgtttttgcattgcaccaccattgctgtgtaaagttcactcaactttttgttgttttgacggaggaaaaaaaaaggatattgcaggctgtatgatattctgaaaagcaggtgttatttctgaatttacagtctaacgagttactgttaaattcatatgtttatatatggttacctcatttagcatagccgacatggggtacccacgctagcgttaaggatcatactattgctctattcgcacttcttaaagatatcaaagtctagtcttcatcataatttttctcttgcaccattggagttgaactcctactgatggatagtagttcattcattaatgtgtgttacacattaattgatttccttgcccagaaaaaaactaatatatacactagattttcagttggttttagactgatggggtaaaaagaaattcctagagctgccaggttatattcataagcgcgtatctgaccaatttttattcccgttcaatgatggggatttgaggtaaacaaggttacaaattgacacatgcacatcttcaattgaatttcctgaaaatgttttcgtaaaggttaagatgatgcattgaaaatgagaactgtcatgtgctttgcatgtgtttttaaactatatatgaatgaatgtaccatatctgaatatttgatttagatgacgaaaggtatcgcaaaatcaatatccaggacaccacattagtgccgcttcgtaagggccatcactgtcagttttggaacagtgctaccaataatgttgagaaatctagtaacaccaacaagatttggctattacataaccaaatatcggtagaaaagttcatcgtcaaaacacacacataaactatttttggtcttgctcaggttagcattacacaaatttgtttagttttgttacggaacaaaacaaacacacccttaagcctcaaaccaacaaatgtcattctttccatctaatataactgaagatatgccaaaatttcgacaaaggccatcatttcaaggtgaaagaacaggcttccaagattgttatctggtgccaatcttcatagagtgactgtatttagtactttacttgtcaagcttcatgcattatgcgtttggtatctggaagctcaatcccagggctccaagcagcatttcttctatgaggtttcatggtacgtcaaaatgaactcacataaagactgactgccagcgtcatttccttctctgaggatcccgagtaaggccgtgctttttcaaagttgtgatatagcttcgcatcagaccaaacttgttagaacctaggtggtgcaagtaatcccatgtaaagatccctgtcttgtgcagatcatcaaacaatatcctgcaatacaaatactaggtcatattatagacatactgtattcttgcggaaaatcaaacaagaagtgcatataaaaagccacaaagaattgcttactatttttttttacgaaacaggatcaattgacattatgtgggggaaaacctccacgaatttgataatgcaagaaacatgaccctcaccgtactccgtaatttcctactgattcagctgacattattccaacatgtcgccgcccaaatataacctgatcaaagaaatgcagattggcataatttccaccgtaaaaacttagtagaccgaaattttctagggcaccgaagcgatgccaatattaaagatacagagttaaggtctctgtccggctgctcagctttccaaggctaataatctacaaacgttcaaatttattcataatagaaagtgtagccctttagaaactataaaatgcacgacagctccactgtgaatggatataacgagtgaatgggctgatctgatacaacaagtgaatgagtaaaaatgcaccacattggccatccaacaagctcagaagaccatgtgtgccactgagtacagaaagtgcatggtgcattaccttctcaccagctactgatctgattttgctatcagctgctgggctgtacactctaagaaactcagcaggcagatggaatgagctgccatcctcaaattcaacttctacctgacaaaaaccagtagcacatagctcatgtcaaaagacacacaaacccataccctaatcaacactcatatgaacaattcgagaagaataatggtttaatgataagttgagaaatgagagttgaacattttttctacaaccaattgtctgtttaattgttcctaaaaaaaactaatcatgggatcactacccataacatttcaaaatttaggcatgtaacattagaacacattagaattacatggtacatacgaacaagaggagtacacatattgcacttgaacacaatattacaacctatgctgctcagctaataaaattggttttctcatgagaaattttttacttgcttcaatcatgcctgatggcaacaaagttcttatgcatccttaagcaatcaagtacaaagattgtcatataccctcgtaatctcgttcaccagcaagtcgccgcgacgttgaacaagggattggaacagtgcaactgcttttgggaggggaaggaactcacgaatttgggcgcgcgaagcgcgagcttcgtcagccgcgggggctgcgcctgcgcctgcgccgcgtggagccgccggaccaccgccgcgcccatcgctgcagccatggacggccagccggtgaagcggccggacctagcgggaggaggggcgatgtcgcgaggggcggaggaaggtagggagaggggcggcgacgcggccgcggcgtcgatgcggctacggtggccggcgggcagcggatgcggcggcgaggcgaggcgaggcgaggcgaggggcggccggagattcgggagggagaggggtagcgatggtgacgtggcgagagaataattggagtattgatttggaattttggattaaaatcataacgggaaacgctacacgagaacttttatttttcttacaaactcttactccctcctttttgttttatatattatattatttgttttgattttttttcatagttaaacatatttagctttgatcaaacttttagaaaaaaaaataacatcatttacaacatagtttcattaaatgtaacatcggatatattttgatactatgtttgtgtgatgaaaatgcagctatgtttttctataaacttagttaaaattttaaaaaattaactagagaaaatttagagcgacttttaatatgaaacggaggggtatcaatgttgatgtgttttcttgggagcaaatctattcgtctagctaaattaaatgattatttaaaaatttgtttcttaaaagttttataaaattttagtagtaataaatcataatcgtgtttattttccttttaaaaaatacactttgatttaacatgtctcgatttaataaataaattgaattttaacatgcttcatgtaaaattttgtttaaattctataggaagtggggacatatttacgcatttcaaaaaaaacattctcaactttagtggtgtaaatcatctctcctctaccaaaattatacatgtgtcatttgtcttttaccatcttttaccttgataaccattgtattatcttgtttttaacatttcatatattttatgtagcattttagatctctatggatttcttttatccttttctcgaatgttgtttttgatgtttgttatagtgttgttttttaaagtgctatcacactaaaatgcgttgttttagcgtcacaactattgtgacactaaaatagaagccattcaaatttcctattatagatatctaagaataataggttatctagtgctagtcatgcatggttacaatggtttacatatattatgttcttacattcatcaattcacaggcacattttaagtgaacttttttttctaccatgttatcatcatcacacggttcttaataaaaaggcaacgataaggcataatgcatagtgaattccaaattgagcgaaggcggtcactttgcgatattgtgccaattccagttttgaacgaccgcatacttgtttcatagctttcaactgagcggtagacccgacacaactgacggataagcggattgagcgcaaaagcgcatccgttttcttgctccttggcttcaagcaatcgattgaatctggattcctttgcttatcctttctggctataatctctcttgttccgttttcgcaatgtgttcgctataaatatcatataactattacgaataaacaacatcaattggtttgccaaaatttaaaagcctccatcaacaaataagcgtagtaatgcataatgtttatatcgtctcaactgactagggaatttggagatgcattgagacgtctatttttcattaatttttagtgaattttgacaaatttcaaataaaaccgttagagatgcacattttaaaatttgaacgtgaaactcgtacgcaattcgtttaggctgtgagaatcgtacctatgcgtaatacttctacaacttgtgtcaacacggttaaacatgcttcaaattaaattatactcaatacacaagtttgaatctgattcgaatataaattaaaaaatatcccacgtgtaaagcacgacaaaacgttttaaacttgccccgacaaattttgttttgttcaagagacaaaaaaaaaaaagaaaaagaaaaagaaaagagaaagctattcccagtttcccaccgattacctcggcttcgttaacgttctcgtttcccacggctattgcctcctccttccctctcctctcctcctctcgtctcgccctcctcctccccacctccacaacccaaccccacccccacccccacctcctcgcggagatccccctcctcgccgcgctccccgccggaatccgcggcgagcggcgagcgtcccgagccccggatcgccgggaaccgcgccggatcccgcgggggctcggccgccgcgagcgagctctccccggcggcgtttccccggcagatccgatccgaggaatcctatcgcgagggcgttggcgctgttgggcggggtggggggaaaaacttctgcagaggaggaggaggaggaattggggggaggccgtggcgacgcctaggtcccttgcgccgtggacgccatgattgagcagttcgtcaatttcgtcatccggccgccccggtacccacattccgtcgcccttgtttgcttgtggtgtgaatttggcatggttggtacattggcatgtggccgtacgtactgttgtgaattgggagatttgcatgattaatgcgagcctcacgtacatgcagcttgggttcctcgattgctagtagattaggtagaatctaggttgttttgagtttatgttttattcgagcaaaggggaaccacgggcattatttattgaaaccagtcattagttcgtacagaaccatggaagcaagatgagcattcaagctactaggatatgctggaagcgccaagttctagctcgaaattcgatacattatgcctccgtaatccatgctagagaaaagaagcaaagaaaccaataatgtgcttgaaagtagcccaaagttactttgacatgtttcagtaaaatttctgtagaaaagatacaaaggaaacaaaaaggtgcttgaaactagcccaaagttacattgtctggtttcagtacaacttttgtcaatgcaatatgctggctctgaagcctccaccctgagcagtttgtgagggaggctgaaccggtcatgctaatcttaccaatgattcatttcaaaagtttgcatgtcaagtgtgagaacgaggatttgtacctaaggatagtcatcttggatatgatggtacattggcccttgattttctttagagcacagtaacctgcttactgttaacagaaacctgataggagtacatgggctcttgatgttgtagatcggtaccatgtgccataaaagctagagttaggtacaatggaatggtcattgcagttggcattgtgtgggtagttgtgcatgtatgggcatgctctataatgcctataacatataccattaagaagtagctttagtgtggcacgataatctagcccatgctcacatgacaaatgtgggcaacctgctgagtggagggataacgagaaaactgttagcagttgaccttcttaggtgtcggattttttcattctggttgcgaatattatggatatgtctttttcaaacttatctttgtttaaggggaggtgttttttgcattgagttttgaattggaacatctgcacatggaaatgttttctcttcactgcatttcaaagctgaaaaatctcataataggtgtctaatcaaagaatcagagccatgctgatgcaatgtataaataattgaatggaccattgacttagtttgcatgaacctgtcaactgacaatggtacagtttattgaaaagaaaattgtaggaaatcactgtacacggtcccatggaatttaccagttacttgtctgcaggtcagagtataatccagatcagtatttatgggagacggagtttatccttgctgggcgcaagtacaaacgactagacttggaggcaagtaagggaaccaattgtcgaggtttttttctttaattcatttactgggagaagtttgactgcaattatggacatctttgttgatagccttattctgcctttaccagcttacgaatgcaagaggccttacaataaaatgcagccactatgttcctgctttcattccagagaatacttctcttccatgtgtgatttactgccatggaaataggtatttaccttgtgtgctcagtgctagcatattagtctgagtcgtgttttctttaacattcagattagtgtattttgatatattaatatgtgctcctaagcctttggaaaccaaattaatattaagttagtagcacacgttatgagctagcatttcctcttaactgatgagattcatctcaagcaatcaccgatatcttttggaatctttaacaggcttttgctttgactcaatgcagtggatgccgggcagatgcaaatgaagctgctgttatactgcttcctgcaaatatcactgtttttacacttgatttttccgggtcaggtctatcaggtggagattatgtaagccttggttggcatgaggtatataatcagtatcacttttgttcttctacatttatatcatggataattacattattctgaaattttctagaaagaggacctaaaatgtgtggtgtcatacctacggaccactaagcaagtttcctgtataggcctttgggggcgatcgatgggtgctgttacaaggtaccttttagtttggatatactgcatgctccttttacttggtggtggagatttatttatttcacttcacgtgacttgattgatatgttacaccaaacagagatcaacattgaacaaaattatctgtacttaagtggcctctgattctcccgttttgctctttgataatgtgctttagaaggtttttaggctttgagttcatgtcatgtataagatgtcttaaatatgtgatctttgcgtaacggatccatcccaattcattcgttgttttgtgaactaatgtaatacagcctactctatggagcagaagattcctcgattgctggaatggtattggatagtgctttcactaacttatatggcttgatgatggagcttgtggatgtctacaaaatccgggttcctaaattcacggtatgcacatattctgtataaagttgcttttgttccataacaaaatgacatggaatgctgcaatattgcattggcataatttgtagggtatcatggcttataatagctatgattctttcttgtttctttttgggaaatcagattgttctattgtggcttaatagctcaatatttgcccatcgaaaccatggttttactattcagcactcagtcacttagctcttagttgcaattgttattttttgagcaattattcaaccaggctaagttagtaattacttcatcaggttaggagtgtaaaagggctttgagttatgtgattgaacaccattcagttgcttcaacttaaaatgcatttatatcccatttttaagcagagaaactacctaacttactgccaatgttatttgatttctactttcattggtttgcctgcacccccataattaccaatttacatagtttcctttgatgtgatgcaagaaataaacatgcaaataaagctccattctcttgatggaattgcaaacgactacacacaacttaaattcatcttctggttgcaaataactatgataacttatctggtagctctatcttattctgttattggatatgaattttaattttagcacacccttattaaaattacttcttccttcgtattcagctttcacttctaatgttgtgaagcgtagcatcgttgtatgttcttactaacataagctcctttctaaccttagtgagcattgctgtatttgcattgttttaatcattttttttctgaaattcgtcgtttcaggttaagatggctgttcagtatatgagaaagatcattcagaagagagctaagtttgacataatggatcttaatgttttacaggtttactttctgtatcaatatctcgcaatcatagtattgtagaagttaacacaatgtaatcttttttgttactgaataaacatgtagacgcataagctcatggagtaccataaagactatttcagactacattttgcaattattcactgccattggttatatttcatattaaataacactatggacatgataaatgatattatcaaatactccctccatcccaaagtatagtagcaacctagtatacgattaggcttatccagatttgtagtactaggtggtgcctaatcatgtactagtatttggggatggagggagtaattagttttctgcagagcctggctgattatgctgggtgttatatgtaattgcctccatcccaaaaagaccttattgtgcatagcaagaaatgaagtctttctgggaaggaggtagtaatacttagaaatcctctattagtgaactgttgattattgaactttgcgatctgaagtgctcttagttgcagtaattttaaatgcttgctcgctcctacaattgtggctgactttgtgttctcttgttcttaaacagttcgctcccaagacgtttattcctgcattgtttggtcatgcttcaaatgacatgttcattcagcctcaccactgtgatcgtattcaccaggcgtatggggtaatgcataatgtagtttgttttattaatgccactcaaaatcaaataaataatacataaatcgctaattgactgttcctggcttcctgctgaagaatacattattatttgtttaaaattaaatcatgtttattgtacagggggataaaagtataataaaatttgagggtgatcacaactccccaagacctcaatcatattatgattcagtttcaatgttcttctataatactttgcatcctcctcaattgcctgtgaaatgctccaataatctaggtgctttcaaagttggcacggtgaccaatgaggtaaagcttcataaaatacgttacaaaacttaatttggaaccactattgttcttatgaagtactttgagtgaaaacaaatatttgcttttgggtggtcctccagagtttcatttttgagatcattagtggtctacgaggagctggaaccaattcatgcagttcatcaatagatgcatcgaaatttccaaatggtgtgttacgttccgctcttttgcttccttgtagttgaattgtataacaaggcgctattcactaactgtatctctttatttcagctacaacaccagtagttgaattgctgtcagagagtgtgaatcagctgtccattaagaatgacagtgacttggtaggattgctaatgatacgttcgtgcatgatatgcaataccctttcctgactgttcgattaaatgcaggattttcttttagacgagaatcgcaccctctcagaaattgatggtgatagtgctgggtcacgcttgcaggtgaagtatataaattggttaagcagaaattaatcactgtattttgtagtgaagctcaacattatctccatatgagtaattgaggtcactgtaagaaattgtggcaattgtagcacaactatggtttgcttagtacttagtagggtcattgaaaccaatggtcagttccattcatcatgattgattacccggtggacaacaattgtatataattgtcaacagacaggaaaaacgcttcgatattcctgtacctgtaagttgtgtgatgagtgatgacaatatgtctgcttttcttataggacaaatcaagtgggcacaatgaggaatcctgctcatgtacaagctctaacagagaaagttggggtagatgttcctctttagggggagctagtgacgactcattccctggcgatattagtgataagcaagaggtaagttgcctctcttacttccctttcagtttagttgtgtgtactaaaaatactatgaaagcaggcacattggatgtgaggtaattatgataaatattttgcatgatatttagattaatactgttatatagcttaagttgattagcttagtgttactaatcgtttatttgggtttctctcaaataagttcaatattttttctcattataaaatctcagatacagtaaatgtgtcttgtagaatatgactgtaaaggctctggcaacaccgctaagacagaaagacagcaaatcgacaaccccaaaaacaaaggagaagaagaagtcactatggaagaagcttaaccgtgagagggcaggggtgggtgatagtctatcgcaacgtttgaagatgtgcctcagtcattcttctcgtcacaagagagtcaaatcatctgggatagtgtaacaacttattagccttgacaaagtccatctcaacgaatcactgacactgatcagttccgtgaacaccgaatcgccttgatttgattctgacttacctgctggcactaccagtgccagattgtaacttgtaacactggtgagtacatactcgattgccatggctcgtgtcaagcttcgcaggagcccatgagattgagcgacacgcccttgtatttgctgtctcctgtaattgcgatctctggctcgctgtttattttccttttaccacttgaatgctgtaaattacaatgctgtagtgcaagagtgcgactgcagcttgttggtgagatgaaagggatgtcgtgcgtcgttttttttactgtgtcctgttcatatttatttaatcattctgctatttaactttactggaagggacggataaattggatcggaggcataacaattgttgagctcttgaaactttatacccaaaaattgtaaaaactctacccaatttttaaaacattcaacttaaaatttgaagctttcaacttaaattttaaaaatttatattaaacaactctaccttgagtttaaaatttttaattcaaaattaaaaacttttagttcgaactttgaaactttctattgtaaattaagaaaacttcacctaaattttagaactttctactataaattttaaattacaccccaaatataaaactttgtatttgaatatttagatttattattgattgtatcagaaaacatttatggtctaagaaaggaaataaagcatcacaaaacgctgtttatatgggcaaaaagcactcgtgggttcgcagcccgaaaatgaaacgggaaaggttgttataaaaaaaaagggaagattttttttttcgtttcccactcgagacaagtttgtggaaactccagctgagagagaaaaatgaaaagaaagaaaagagaaaaaagaaaagaaagaaaaaaaagaaaaccaaattgtccctctccctttcgcttctatgtcgtgctgatgtcctgccactaggttgctacttgacgcctgaattcttcgctccatctttatcgtgtttagttccaaactttttttttttaaatttctaacttttccatcacatgaaaactttcctacacacataaacttacaacttttccatcacatcgtttcaatttcaaccaaacttccaattttagcgtgaactaaacacaacccttatcactgttcatccttcttcactgccgcaagcatttttccaacgcttctcaccttacgctgcccactggccaagcggccactgcctgggcttgaagcattctctttcctctacctccaagccgcgggatctaagggctttacccatgcccacaattgattcataggtattcaaacttctaaatttaactccagaaattaggtttggactggagttgtagagtagtctaaacccagcttcacatctctagttcattttataagagcgtttaggtggagctgaaatcgtttggttggactccaacatcaggagagatggagttgcatatggagtcatgccaaacaggtcttttattgtacatgtagtgtagaaggaaaattcagtacaaggaaatttccctatgtagtgtagaaagcatgagaaatgaacattggcacatggcacatatatacatttgcacaagttatgaaggaccaaaatgtgaaacagaagtgttggtgggtcttgcttatatggataaagcaaaggcgatgggtggagaggagaacccatgggaactgaaaatcttcaaggccttgtcccgtttgcagcggactacaatgtccatatcagtcttctccccctccactattttataggtggtgagatttaaatacatcttccttggatagaattcgtgtatatctttatcataagacatgtggtgttcgcggtcatcaagcctgaatgtaatgcaagaaaagctcccctcgtcctccatggaagccaagcatagcgcttcccctacaccaacctcctcacgtgcctcggttttcaccgggaactcggtgacggatagcttgagatgaggagcggatgagactagacggatgcctactagtggcgtcgcggagccgaagaacggcaggccgtagtcgtacagcttgtgccaccggtgagtgccggtgtcaaatgcataggttgtcatcttgcccatattattcacggacacgagcagataggggagaaatagcacgtaggaggtgacgaggatgaggggcggggcgaggtacccagccggggagagcacacaagggaagcatatgggatccggcaaggcctcccacgagcacccatcgagcgtgtggcggccgtccgccgttgccaccaccgtggcccgggacaggtcgagcacctcgaaccacggctcgaagtattgggggcggctcgagaggacgtagatcctgtccccgacggccgccgcgacgggcgacagcttcgcggacagcagcttcggcccggtgatgaccctccttgtctcggtgtcgaagaggacggtgccgccggggtttcccccgacggagacgatccaccttgagcgcacggagacgacggtcttgcaggccacgtccgtcggtagatgagcgaagcggtggaggacttgttttgtcaccggcgacgacggcgaggaggaggaggaagagtcgtcttccaccttgtacaggcggtagtaggagtgggaataccagtcccgacggcatactgcaatgtacgccgctggcaatggatcccgcaccgtcatcaggtgggagtcgtccaacaacggctcggcctccagcagatcggtcccgtcccggcggtggtggcggcggtggcggcggcggcgccccatcccggaggaggagattgaacaattggggattcgatcgggggtgagtttaggaggcaaagtggatagattcaatttagggtacccttcaatttattataggccagccaaccaagtccctgtccggctgtcctcaaccaactcggcccacaggcccgcctcacatgtgcaatcggaaaaggcctgatatttgccttaacgatttcgattttgctaaagatttctcgtgagatatcactcgaattttcgacggttcgatatgctctgagatccgtgcgttttcatgggccagctgacccttcgcacatgggctaaagctgtgatgttaaaattgaaagatttaaattatgaatttgctagtcccaacgggtaatacggatgaagtactccagaaaacaaaagaagggatacgaatcagattccaacaagaaatgcgaatcagattcggatcagtcgattgtgagtttaaaaaccaacaactcaggttcttactcttgtgttgggctgttattgggctgtgtccgtaagattacccaacaggcccccctacgtagtgcatccgtcgccgcttttttttttttttgaccttttccttttcttccacaacaagaacccatcgaaagcaaacgacgaagatggcgaccaagcgacgcctccccttccccaacccaacgaaagcaagccctagatcgatcttggagacgaagacggcgaccaagcggcgtcgagacgaatccgcagagaatcggaaggcggtttacctcgtggcggagctgtcgacaaatgagccatcccactccgtcttcatggtcgatgctgccgctgccgctgccgttgccggcggcggcggcgaggtgcggcgtgctcaccccctctcggggtcggggctgaccggtgcgaagcacggcatgtccttcgtcgccgtgaggtcggagcacgggtcctggattctgggcgccggtgggcgaggagggtgcaccgtgatctacgatccgatcaccatggaggagttccgggggccgcacctccactggcccaagcaggcgtggtgtacgccatctcacggcgccccagggtgcgcctcgcgacgaggctcgactacctgccgtgggtcgagtccctcagcttcaacatgggcgtgccgcgcctcgaccgcatggattccccctactggaagtccctgccgccgccgccattgttcccttgcctcctgcgcccgtcggagtaccgcaatccgcccgactactgcgtctcgtccttcgcggtcgttggctcccacatcttgctgtccatggagcaactgccaggagaagagcagagaggaacctacggcttccatgtggtggacaaggcgtgggagaaggtccacgattgcaacctgccatttgttggccaggccgtgtccattggtggcagcctcttcgccgccgccatgcccaacaatggcggcggcggcgcttctgtgttccacatgtccatcatcaaggtctcctcctcatcatcacctgcaagctggcagctattggtccaagagtttccagtggcatcgttgggaaggatgattcctcagccacggatcttctctcccttgggagagggcagcttctgttctgtcgggtggctggcttcctctggtcgaagccatggatgccagattaaggagtaccagatagagggcgccgagtcaaagaaagatttgcaagccacagtacaggtgaagcaccaggaccagacataccaattcaagggccaatctcgatttctggatacacatatgcctattgttgctgcactgtccatgtaaaccatctggggctctcttgctgtgcttctccttgttttcatacagcattacaaaattatttggagcacttgagacaagtggtcgtcgcgggcgatggcgcggacggccgcggcggctgcgggtgacggcgtaggccgcggacggcggtggtggttggtgcgacgacgtcggcgccgggtgctatgcgagagacggagagagaatagccgaaaggagatgggaggagtatgtgcgtggggtccacagttggccagtcatttttggctagccaaatttggctagtgaagggagggttttggccagccagatggcttagccatccggttagagaggttgttggagggtattttttttgctggaatagctaaaatttagcttagagagtcatttggagaggttgttggagatgctcttaggcaaaatcaattgttttgtttgagaaagcttataagtgttcttttgctcagtctcaacttgaacattcgggccacattatgtctgatcagggtgtgagtactggtcctgataaaactgttgtgatgcttgcctagactatattcccactaatcacactgagctaagaggatttctaggcctcacagggtgctatagaaagtttgtactccctccgtcccataaaaattgcatttctagctctaaggctttgtcccataaaaattgtatttctagccatgtggggcccaaccaattgattcatctatataagtttccttccatcccacgtaatttgggctgctaatgcttgtaattttattaagtatgctaattatatgggttaattctctcaaacttccttttaatcatttgtacatatggaatatatgcatgcagtggattcattaaataaggttattgtggtcattttctaatcctactattttgtcctaaattagctagaaatacaatttttatgggacggaggtagtacatcattatcgtatatgataatgctattgcagaagaaagcttttcagtgatctattgaggctcaacatgcttttgaggcattgaaaaaggctatgagtaatactacagtgttagctttgtctgattttacccagccattcacttcggagacagatgcttgtgcaatgggtattggtgtcgtgttaagccaacaaggtcatcctgtggcatattatagcaaggcattgggagtaaggaatcaaaagttgtctatatatgagaaggaatttctagtgtaaagatgcttgtggaaaagtggagatgttatctgcagagggttccttttgttattaaaactgatcacaagagtctctgcaatcttaatgatcagattttaggcactgaattacaacaaaaggttatgactaagctgatgggtttgcaacatagctttcaatacaaaaaggggttgaaaatatagtggcacatgcatcgtcccgcagacctcatcaggttaatcttgcagtattatcagtagttcaacctgtttggatttaggaagtactgaattcatatgtggttgaccccaaagctcaacaatgattaattgaattagcaatggtaaagcagaataatcaggggttttccctaactgatggtatgattaggttatatggttaaagtgtggattggagcaaatgctaggttgcaaaccaaaattatcacaacttttcagtctattcctattggggggcactccgggattatggcaacttatcacagattaaagaaactctttgcttggcatgggttgaaagcagcagtagagaactttgttcagcagtgccaagtgtgccaacaagccaaacatgagaattgtaaattacctgggttattagttcctcttcctattcgaaaagaagcttggcaagatatttcaatggattttattgaggtaccggtgtctaatggttgtcattcaattttggtggtggttgaccgttttaccaagtacaatcattttatccccttgaaacacccttctattttttcccaggtggccgctgtggtggataatgtggtgttcaaaacacatggtattctcagatccattgtttcaaacagagataggatttttctcaggaagttttggcacgaaccttttgcagtgtggaaaactaaacttaaactaaacgagtaaaccaatgtttggagatgtatcttcggtgtatgactcaggcaaatcccaagaagtggtgttcctacttgcatctggccgagtttaggtataacacaaatgatcatacttcacttggttgctcccttcataaagcaatgtttggacaagaacctctttatggccaaatgcttgatttgtctgaagcttctcagccagctgtggttgatctgattattgaaagaacacaattgaatgactttatgaaacagcagattaccagagctcaattgtgcatgaagcatgtcgctgataaaggtcattttgatagacagttcatggtgggtgaacaagcctttctgaaacttcaaccatatgctcaatcatcggtagtaaacatgccttattctaaattgggattcaaatattttgggctctatctagtggagatacgattggagcagcaacttataaattggcactgctggaagggagtatatggttcattcggtctttcatgtttcgcaattgaaaggccatgttcctgattattcaccaatatactctactttgcttgtacctgtcgtgcttgaccgacgcttggtcaagaaggggaaggccacgcatgtgtcaagctacaggaacgacaaggatggaagactactcaatggggtggcaatgtcgcacctgcttcaggaacgacaaggatggaagactaagtctgtagctgtgttgtatgcgggtctgtgtgattgggcttggacctacaaggtggtttctatgagatttcggccatgtactacttaaaggggaacctagcccaagacctggacatgaaatgaatgagagaacaaagtctctcccctatctgaccttctttcttcctcacattgcttctcccctattctctgttcctctgcttaggttatgtttagttccacgccaaaattggaaatttgaagaaattagaacgatgtgacaaaaaagttggaagtttgtgtgtgtagaaaagttcgatgtgacggaaaagttgaaagtttgaagaaaaaagttggaatctaaacaagaccttactcttctatctctcgatttctccaatcaaatctcatagaaatccctgtgatggtggagatggcggtgatagattgcaacacgccagtttgcatttgccaattggttagcaattcatacatatttcaaatttagattttgtatgttaccactttgatatgttgaagagagagcacttctatgtgttaaacaatgtcaattctatgaataaatgaaattatgcttaattatttattatgtcagctatatattgtacacttagtactagtgtactacgtgatattatactcccccgtccctgtatatttgacgccgttgattttttagcatatatttaaccgttcatcttattcaaaaacttctgtgaaatatgtaaaactatggctatgtttatatccaggggtgttacattggatatacggacatacatttgaagtattaaacgtagtctaataacaaaacaaattacagattccgcctgtaaaccacgagacgaatttattaagcctaattaattcgtcattagcaaatgtttactgtagcaccatattgtcaaatcatggcacaattaggcttaaaagatttgtctcgtaacttacacgcaatctgtgtaattggttatttttttcgtttatacttaatactcaatgcatgtgtccaaacattcaatgtgacagggtgtaaaattttatcagtggatctaaacagggtctatatgtatacataaaagtatatttaacaataaatcaaatgataggaaaacaattaataattacttaattttttaataagatgaacagtcaaacatgtttaaaaaagtcaacagcgttaaatatgtagggacggagggagtacatgccaggtattaaacttttgttgtaaaaaaaaattcttgcattttcatatgttgaatctttatacattgaatacacaatatcaaaccctgaacccgccttggagaaggagaggtagaagtgtgtggcggactgggtcgcttcccgtgtcgccctaggagtgacaaggggggccttctcaacacgcttgtgggagggattaatcgaacattgtcttaggaggagctcatgacgggtcatttccagtgatattatttccagtgatattatattagtgataagcaggaggtagctaggttgcctctctaaattccctttcagtttagctacgtgtactaaaactacgatgaaagcaggcacattcgacttgagtcactaaaattctgataaaaattctgcatgacattttgatattatatcttaagttgaagttagcttaagttactagtcgcttatttgtgcttctctcaaataagttcaacattttttccattaaataatctctgatattatggtaaaaactatagcaacattttcaacacaaatcaaatatattatcaaaatatattcaatgttttatttaataaaactaatttaatgttgtagatgttgttaaatttttctataaatttaattaaactttttttaagtttgactaataaataaagtcaaagcgaaataaaaaatgatttgtaatatgaaacagatgatgttatactactttgttcggtctttgtcgtgcaactttgactattatttctctgctagaatataacgataaatctaacaaactctactcataacgtttttacatttcgatattttgagagctattaatgattaaaatttcaaaagttttgtcgaatgaaaccaaaattaacatatatttaaatagagagggagtataatttatacccttgtgagttgtgatgactcatcttacaaagggaagtaaagaggagtgagatgtcggaggatttttacaccggttgtgtctggctgagagttttgactactcgatatcatgtaacaaaaaattccgactgttccataagcaaggaggaatgcctctacggttctgaattctctaaaaacagaaatagaactgcataaacccatactattcatgcaattttccatttaccattttttcttatataaaaactgttatgaaaatagatgtacatcggagacacgaattttacgtggaaaacccttgcgggaaaaaaccacgagcgccgaccggcaatgatcactatagaggaattagatacaaacgcaggggatacattgggctgtcgccccctccccatgcggctttcaagggatatatataggagaaatctaggagtcctattagataactaatccgaatatactgtgggcccaaaattcggatcacatatttaacaatctccaccttgatacgaatttcccttgtagcataaaaatcttcaatctccaaagaacctcgtgatgataaaatcaatgtgcgccaaatagtcacgactataatccataacacccttgatccagaagaggtagactatacttcaaactcgccattgggatatagatcctgaatctgctagtataaaccgatgtgaacctagcagagaagcgaaactgatgcacaaacttcaaactcgccatgggaataaaatcctaaatctgctggcattaatttttggaatcctagcagaaacgcgaaaaattcttatgctcaaaacaaagtacttaggtctccttattaaccttccggtctgttgggcatgatggtagcaaaattcgccatataatttgatcaccttgtgatctagacaggagcgaggctccctctcgacgacttgaatgtgcttctctttttttttcagcatacttctcctcttaggtaaataccccgctgcaaaacttcacttgccataatgagaatattgcatctcaatccattgccataacgagaatattgcatctcaatccattgccataacgagaatattgcatctcaatccagaagcagtagatcaaactttcaactcgccttgggaataaaatcctgaatttgttggtataaatttatgaaaccctaacagaaacgcgaaacactctgggtgtataaaacgaagtatttttgatctctgtatataacctcctggtaaatctggcttgtgaacgtagcaattgaaagtgaatttggattcacctcgacagaaccaagcaatgcacagaacttgaattcctggtgcgaagggcgtgtgcacttaacaattccaacgtgaaatttaattcacatgaacaagaccgagaaggctgctgaaggcttggacttttctccttcctcgggatgcgtgcgaaatagatcaatggcttcaaccctgctgctgcttctgattttctcctgcgttgcttgatggacgtgattccgatcgatgtgttggagcacctgcttaaatcgatctggtcgacaccgcttcgggtttgcttcaccggtgattcaatctcaccgaattgatttctgcgacgacgacgacgcgttgctgctgcggccgattctccgcgacgtgcgctgctgctccttcctcggcggcggcaacgacgaggccaatcagatcgatactccgatccgaaaaatcacaccggtggctgtgtgattagtagatcgatctccaatgctctaataccacttgttatgaaaataccacttattatgaaaatagatgtacaacggagacacgaattttacgtgaaacgccgaccggcaatgatcactgtagaggaattagatacaaacgcaggggacacattgggctgtcggcccctccccatgcggcttagaagggatatatatgggagaaatctaggagtcctattagataactaatccgaatatactgtaggcccaaaattcgaataacatatttaaaaaaacaactaatttatcatcatgaaagattattaagaacgcatagaattctaaaataaaacaacatgattatagcacgggtcgacttgcctgaataagctaaaagtcgttagaaagagacatataattacatttaaaaatttaatgaaaataaacgaagtgagagaagtaagttattggtaatgtaacatccccacttataaataattattacttcctccgtcaaaaaaaattgtggacttacacaaattcttgtgtttatagataattattactttctccgtcaaaaaaaaccatcctaagtttgagtgttcagattcaaattcaggattgttttttttttacgaacgaagacgtcaatcataaaaaaaaataaaagtgataaagctatatttagatttttcgtctagtagaagaaaaatgagacaccatctgcatgtacttacggagtttggagaggaagaagaggagacgctatcacccaccacccgtccactcccggcgagcacatgagccccacgtgtcatccacccccacgagccgtggggcccgcacccccgaacggcctcttcgctccgcgcacccaaccaacgctgctgcttccaacgccatttcttggttttccatccgccgatccactcgcccgatcccctgccgatccacacgcgcgaacgcgcctctctcgccgatccccctccttcgagagcttcgtctccgaggcatttcggagcattgagcggcacaggcaaaggcaatcccccgctttcttgatttttttttctttttcgtggttcatatcatcggcggtcggcattttaatctgtatgaaactggcgcgtgtgttggtgatcctgtttagaatctgtatgtaatctgcggtgggagatgtatggcttactactgacatgtttcttgatttgtttgtttggggtatttgttaaagaattgcagatttgcagtatgggctggttcaaagattctgcattattctagtcggtataaagaaatcttgttgtctgatgctgccatgcaatttggcctcttgttagggatgataaccagataagtagtctacattgttaactaggagcgaatagaaaatttgcaggcacattatcatggacaaatctggttgttgttgtgttgattgattgaatgtcatcaagcaaaaaaaggtgggtgcatactcttaattgttcgcaatgattctttgcgagaatcatgggtttgatgatgcaaccaaaccaaaaatgtaatcgtagtcctaactactgatggaatattgggagcaattaggtaggtccgtaggtagatccttgtcactaggatgtacaggtcctatatgctttttgtagcctccattgggcttatgcgcatcgtgccgcctcaagttttgtcgagtaaggtttcaggtaatgcacaaccatgattgtttccttttatgaggctggtacctattgttgtaggcggtgtgtttcgtgcccccctgcaagttcatgcatccccaaactagatagttgatcatgttcatgctctcatcacaagcgttgtttacatttgcagggaagtggcttctatcaccctacaaaattgcgttgtttgctgaaatggggggcatagtcgggcggggtgattctccaaggcacacttcaccagcatcaaagttagagagaaagatggttgaagccatgcagcagagagcacagaaaggaacttctgttaaatcattcaatagtgttattatgaagttcccaaaaattgacgagagtttgagaaactgcagaattatctttcagcaatttggtgagtgctaaccctgtatgtgtactagtgctatgatattactgatacttatttcttgcgtgctgtcaaaaggtcaaaactcgaaaggaaaactggattgaacatcgaaagcagaaactgtcctgaatattagctcatatagtgatgttctaattttgattgaattgtgtagccgtcaatagctaaatataaagatgttgaaagtttggagttgattaacttgttcgagttacttcaagaaattttcctcaacctaattaccatacagtttacatgtgatcctgtagcctggatcaactaatttatgtaactggagatgatagacctcctcaagtttttgtttccttaatttctcgatttctttgctttttctatttgtgaggattttggtttcgacctaacatcttgtgaattgtattcacttggaaatcccatcctcgatctgtgtggcatttcctttgtccccttttgttttcttgttctgacaaatatcattatgtttctctccagatgaagattccaatggtgaaatagatcaacaagaacttaagcattgttttcaaaagttggatatctcattcacagatgaggagataaaagacctatttcaggcatgtgacatttatgaaaacatgggcatgaaatttaatgagttcattgtcttcctgtgccttgtttatcttctgaatgatccgcttgtgtcagaagcagtatccttcatgcttcattatagcaagtcttcgaatttttgttatcaattcattctgctgctgcattgcatgtatataattaggaaatgtttgccgcttttttatcttctcaaaaatataattcatacatattagtaacactaacttttcccatttgatcacaaaaatcttaaaaatgcaagtagctcgttgcaaagtaagattaaggaataatacttgggtatatggtacccttgcagaagggtgatatttgtattcttgcatgcgtacattgataatctgcatgggcatttagaaagtaagtcaaaggaggctattatttaagacatttttcatgttgcaacaaattcaagacaagattttgaaacaatttcaacagaggtgctttcaaacaaagttgaagagagactcaaagtgctttcctaaaaactttcatcatagcataaacttgttagaccatacaggggcttttaaatggatattctctatataatctgcatcgaatttattccttatcatttctccgttgtgtttatttctggatacatttatacccttgacactatgctttagagaaaaagaatgggactaggtagtcttgaaccaactttcgagacattggttgattcattcgtcttcttggacaaaaacaaagatgggtatgtcagcaagaatgagatgatacaagcgatcaacgaaaccatcggaggagaacgctcttctgggcggataggcatgaaaagatttggtaagttttcttttttgtggtatcgtcacaaatctcacatgaacacagtacacactgacaatgatggtcctaatacactcttttggtggtcccagaggaaatggattgggacaagaatggaacggtgaccttcaaggagttcctcttcgcttttactcgttgggtggggattgatgataacgaagatgacgacgatgaggagggagtgtaaaatgaagatttactcatcctgaattaggccaagtcagcagccctcaggagcactcaagcagtcctcctattgtggcttggagtactcaatgataaaccggagattagttcatgttgtttatgttcttgttaatataaagattggacccaagttatttctagttgtggcgaaagtttagtggtataaagctgctttggtcatatggcatttgatccaattgatcgtagataattaaccctgtcattcaaaaaaaattgtaagcttggatgtttcagagataaaaaattgtaaagtgtgaggaagtgtcattttctttgaaattaaatgtttgttcttgtatataccccctctgtttcaaatataggtgctttgatgttgtttgtcattcgaactcatctcccccttccagtcctatagaatttccaaggcatatccttccgaattatgggattttaaagaattttagagaaatgaggaacccaataaacaaatcaaaataaagctaacacgtggcatgccaaaacttttgcggctaagaaatcgttggccaaatggtaggcaaactttgataaaaaattgtacccatgacaagtggcgatattgagttaaatgttgtgacatgacaaaaatacgatcagaaaacaaacaatagattaagttggtcaaactaagtgacaccgtggatatggatcatcttaagatttaaccaataggataaaactaccttaatatgacccattacatacaaatggatcacctttacttaacaaatcttaataaatcctagctacgtcactgcctacttgacaaagttacggtaaagcatagctataaaccaaacacgcactaagtgttgaaacagttggaggggtgtataaaaatccacattttatcccccaaatagtaatgacaattactttttgaggggattgttggggaatggggccttattagggatatgctagaaatactttaatactccttttttttaaaaaaaaagaattgagttgctgactcatccctggatcaggagcgacgtagacgagctaccgaccaatccccatggagctgctgctgtaatccacacgacagagtcagagatctggggactaagtcccaagaacatccctccctcccctcccagccaggagaaatccaaggtaatccagaatctcccttgagcattcctgcaaatcctgggttttttttttcaattcttggtttcttgatgtctctcaagtataggcgatatcctgaattcctttcatcatggttaggctgttcttagcgctttgctgaattgcatttcttcgaattcatttcatcgcgctgcaccgattgctgttcttctatggatttgacactgaaaaagggggacagcgtgattcactcgagttgagatttctcaggtgtcaaaaggcaaaacgacattgatgcatgagtgttcttggatgcttctttacatatgtagcaggaaactataggatgaggaaaaggaactccttgaagttcagtatttctgtttggttgatgcatatttgcaggactgaaaacattggaaagtgtaactaagcagtaagaagatctgaatatgagtggaagacgtgatgattcaggtacttttaccatcaggcactgagcattcactttctttatcactgcattgaattgcataatatgctcctgctgccctcaaaagagcaaattggagaatcagtcatattgcacagtgaagtgaataatgtgtggtgatcatgcacaaattggtgaccaaaaacaaaattctgcaacttcttggagtacttcagatttggtcattttcaatgggtgtgcatttactagtttgctctttagtgctgacagataagattttgccggtggagaaggtcttgcatgatgaattcatatttcatttttctcatgcagctaagatggcaaaactgaaggagctattgcacagaagtgaaaaccgtatctgtgctgactgcagcgcgcctgaccccaaatgggcgtaagtattttcaacctgattcaaactatctgcagagcatctgattcccagtggctgtaagactttgtagaacctgattgttcaatttgaatcagttggtggtttaagtgatcactagtaattagtttgttttcatatccttgctgtgtttttgtttgtatcctcttctcttctatttattttctctggcaatggtatttgcacaagaaaaaaaccaggcagcatgtattgaggaaaaatgaatgatgcacacacagccttaaatctgaagaatcccttccattttgccccatacctgtcattatgagcataatcaggctattgtacactgattttagttaggggcttctcttgactgatagttccttgcaattaattgtttttttccttacagatcagctaatataggagtattcatatgcctcaagtgttccggtgttcacagaagtcttggcacacacatttcaaaggtttcttcaattgcaatatagatagtgctataaatcttttttcatctttcttatccaattgaattcagcaagtttttctgtatttacagcataggcaaagtttgcactgacaattatggcatattatacatcatgttttgagcataatcaccattcagtatttgttttgagcaggttctgtcagtcacactagatcagtggagtgacaatgaaattgataacgtgatcgaagtcggtggaaattctcacgccaatgctatatatgaaaccttcctgccgcagaaccacagcaagccacatccagattctacccaggaagagcgagaaaaattcatcaggtattttattcctctgttagttcgcagcactttcaagtgcagggtatgccattctctcatctgaattcccagatacaggtcaatactttggagcttcccttttgttctgcaaattgaactgaagaaatagcttaaaaaaatgttctcctatggtgtttcagttatatcaaatgacacatacagttaattacaattcttcaggtcaaaatatgagttacaagagtttcttgagccaagcctacggattgtttctcatcagtctagcgactccgggaaacatgcaggcagtgcctcccattctgtcagttccaagagcgaagtaggcagcactgtcctaaaactgcaaattgcattttgttctaccttacttagcatgttctgcgactcttagattcaaatttagtaatccccgatttgatttgcaggtaggcatgattgagttcatcggaatattgaatgtcaaggtgaaaggaggcaccaacctagccatcagagacatgtcaagcagtgatccttatgtagtcctgacccttgggcaacaggtagtattatgaaatcctaattttctgatggtttctgggcaactaattcaagatcgaattcatcgttttgtaccacattgtctctcattcagaacatgcagaaattcttgttctaaatttcaccatatcttcgctgtgtgcagaaagcgcaaacctcggtgatcaaagccaacctgaaccctgtctggaacgaagaactcaagctctctgttcctcagcaatacggccctctcaaactggtaaatcccctcacagaatcacaaccaaaccttcgaaaatcttctaatctgtttcttccatctgatagtcaaaatagctaattgttcaccactgaaattttccggtgtgttcttccatctgacaattaattttctggtttgttcatacatctgataattagtttttctgattagtgttcatccatctgataattgtgacaattagtttctctgatccgagtgttcatccatctgataattgtgatctttgcttttcttggatgcagcaagtgttcgaccacgacatgctgtccaaggacgacctgatgggggaggccgagatcgacctgcagccgatgatcaacgcggcggcggcgttcggcgacccggggctgctcggcgaccggcagatcggccggtggctcaagtccggcgacaacgcgctcgtcagggacagcgccgtcgtggtcgccggcggcgaggtgaggcaggagctggccctcaagctgcagttcaccgagtccggcgaggtggagctggagatgcagtggtttccactcaacatgtagaacaaatcacgctgtcacttcggatttcaagctggagaattttagaaaaagaaaagatgggttttgataatgaagttcattgcatgaactgtttcagcaagtttttgcgttgtttacatggcaaattttgctgcgttcagaaattttaaatttttggtttggcacgagccattgccctgttaacttggttcatttgtgattccaataaaaaggattcttttgtgctctgggttaaattcttttagcttggcactcgaagtttgctcttcggagtttaaatgttgtcaaacttagatcgaaacattttccgtgtctaatgccagcgaaaaactataaaacattagagaactttgctgaaatttgcgaaataaaacggagaaaatcgatgcaaaaatagggtaaggcttcagtgtgtgtaacaacattaagcgatcagcgacgacataatcgcctcacagaaatccgctaagatcctttcggacctgaatcatcataagccattcgatgggagtatcaaatcaatacaacgatccgacacgtcccgtttcattgtgtatttttagcaattttacattggatcactgtgctcccaaaaattactgtgcccagatttaccatgttccatgcttcaaaatcaaggattcagaacgcttccagtttacagagccgtttcacggagcaaacgttttcgtaatgaatttgtattcgttttcgtaatgaaattatatttcgagaataatacaaatgctctattcagaaaaaaagaaactgggaagaattgaactgtacatacaactgcaatgctcagtggaaagagaagtcgttttttggattgaaagctcacggcgactgacgccgccactgctaaaacccattaaaatcatcattgcattgcgtttctcaaatcgaataccttcatccatgtttcttttagcaaaagtttcaaccaaaatatagcggaggctttgagaggcagaataaaagaacagaaaacaaaaaaagagagaagaaatagatgcaaaaaaatatattaaggagagagaaggcttcagtgtgtgtaacaacattaagcgatcaacgacgacagaatcgcctcacagaaatccgctaagatcctttcggacctgaatcatcacaagccccctctgatggatttatcaaatcgatagcaccaaacaccacgaaaaacaaatcgagatcgcgaatctgcacgaggagaaccaaatcgagatcgacaaaacgaactggaaaaggagatggaccaatccaaatcgagatcgacaaaacgaactggaaaagagatggaggttcgaatcaaaatcaaaatcaaaatcgccgcatcgaagcagatctgaaggggagaggaggggcgagatgacggcggctggcggctagggcttggcttttcctgttcagggcgatggctttatagagaggcggagctcgaattaggtcaccgcaaatctgggagaaattacgcttttgccctcgggcgaactcaaaaacgccagacgaataccgagaccgtccgatcgcccgattagtatttgacggtccagatagagggcagttaaaaatcgaaacaaatgaggaggctttttcacgaatcctgagcacactactttttctttcttcggttgcacaggatatacatacgtgcatatacatcactacacacacaacattattttcgtatgaatatgatctctaacccacgctcaaagagacgaaaattagcggtgtctcgataaatttcaattgcaaacccatttacatgtgcgtgtaatatttataagcaccatgatttgatccatgttatgtggtccaacactgctgcacacggtgcttaatcggagtactttgtttctatctttttttcgattatacagaagacacatacacacgcatgccacactcacatgtgaatacttcgcttggttgatacacacgctcaaaaaagacgtagaacggtggccactctttagattcattaggttttattagaatgatatgtgtaataggacgctcaagaagatgtagactagtggccactctctagttttattgagatgatatgtgtaataggatttgacccatgactaggtttaaaaaactatggaaatcaatagtgaaatttggacttctcggactgggcaaaagacacaaacactcggtttttaggtcaagttaaaaaaaacagaattttaaaatttttatgacatatatatttccggattttattttttttatcaatttatcaagttgttttttattttaaataaagatgaattattgtgctatatgcagaaaaaacactgctacttcaagctctcctgacttctacactttgagtcttcaagggtacacacatagaaaagacaataggaatttactgtgttataagcagaggctgtgttagccaaattctttgtttcattgtctgacctgaaaattgagctgagctcctgaagtataggtggccatatggcccgaggcccacggcccggcccgaagcccgcaattttggcacgacccaagcacggtacggcccaacccgacagccgggtcgtgcctgggctgcaccctcggcacggtgggccggcccaatgcacggcccgatcaaataaaaatatagggatgcaaaatagacttaaataatcgtataaggcaaggcccaagacaggaggtatacaaaatagacttattttccagccatttaacccagcccgcagagttgagggaccaaaattagactttttctgtgaggaagcacgatgggtcatcgtgccttcgggccgggccatgcctgggccgtgtatgccgcccgtgggctggcacaacacggcccggtgtgtcggtcgggccatgccagcccaacaagcctcggcccaagcacgggcgggcttgggccgtgccgtaccgggcggcccagatggccatctatatcctgaagtctcccccttagcacagtttcaaacgataatcaaacaactaggtgtacaagaaatcacacattatatattccatatggtaagcaaattttgcttaccaatttggccgttacaactagtgttctcctttccaaaaaataactatagacaaaaaagaattaaggcatcgggacctgtatatatcatctgcacaccaaggaataaaccaaaccaaagaccaaactttcagcaactgtataatacgctgcattgccagaagagataatctaagagagttcgcagctcctccccacacatcaacagaggatagatcgggcatcgaccaccgactgcggtggatcgaggtccctgtcctgcagggagttgcctagatgcttttgcatttctgatgcaaagacatcgtccaggatctgcacataacactcaaggtcaggattatcattacaaaggtaaagacgttttgcctgtttgggggagcttgtcccagctgcagcttttcccaaaagctgcttctgatagaagctgccccaaacagtccacagcttctgagaatctgtagttctgaaaaatgaactaagaagccagaagctggagaagctaggtttcaaagcttttccagattctcggaagctggctaccaaacagctgcttctcagaatctaaagctcccccaaacaggccctttggtgtttttcagaattttaagattctttgttaacttgtcttaataattgaacaaatacagagcctatatatgcacagttcacatattatttgatagtggataaaatattggtgttaagtatgggcttacccctaatgcataatcagatcctctgtaccaaatcctgttctcttttctgctctcaagaaacctcaacacaatctgtccaaaccccaagttagtatgtaagcacaatttgcaccagaataaaatgttagggttggtctcgttttgtcatatttacctgacccaacctgtcccagaatcctcggcaaatagcaacaaatattctgctggaaaagacttcatgtagattgtaaatggaatcagagagatgaacacggagagcctgcatcctctcacgtatatcgctttctccttcgctttctctcgtttcttcaagaatccgttttagcctagtggtccggttagcttgtgcctgaaatcaataaccaaaacttatggcacctctgtatgtaaactaccttagttaacattggaccaaaatgctgcattggtaaaaggtctgtaaaacttcattcttacattactgacaagcttctccacaattgcttgcaggtatttcttgtacttcttcctcagcattactgtgatggagttcatttgctctccgaaaacagcattcccatttgttattgttagatatgctgcccatgatttgagactatcttcaactcggcagtgtaacacgtctaacattcttttaactgtgttcatgaatgttcctaactgtgatgagggaaaaccaagtggttactaacaaactaaacaccacagcctacagaacacttgacaatgcaaacaaacctgattcggtacaacataagggcttatagattgccttcttgtcaatctttgaacctgcttctcaagaattttcggtatgccgtctctcagaggtagtagagtttccatgtattgcttctccagtgccttcataatttctctctccacatcagcaatagcctgaatcagaaaatgaatatcaatcgagtccaacacatgacaagcatggggagttgatcattcaaggactatgaagtgtgtacttacactctctaaactcatcagataatgtggccatctgttgataactactccatattcatttatgctttcttttatttgttcatacatttgctcgacaaatgtcgaggttgttgagactgcagggcatgataactgcaaaggtaggtgaggaatataagcaaggaagtgcgagtgctaaggtctgcttaatcatcaatgtgtttatggttaccttatcagctctgcaattgtcaagtaactgcaatcgggtatcttcaatccacaccatgatgtagccatgaaataaatcccttgaaaccacacccccatgcacaggtctaaaattttatagtcaaaacaaatgaagcagtaacacattagtgttcaatgtatcagctcaaaagaatgtgacagtttgggagcacaatcaaccggaaaaaaacagcagtagatcaactattcaactgtatcttacctcacttgccaagagtcaagatctctctcaaaatctgcagtagcaatgagcagttcagcaacatgctctagtggtcttgatgggggacttgcagaaagaaaacccttcaatcgtttgcagagctcggtactgtacagggatgctgctatatttggcagatctattgaactaaaggaaaacaaaaaaaaatctgtgagatacgctaccattgtacaaaagaaattaatttcctccactagagtgtatagatgtgttaccttggaagtatattctgattgtgaatcttaatatctgcttgaatttcacgacttatgttaatacatatagtcttcattttgagatatgcagcagaaatagccatagggtccgtaagaaggctgtcattgttgcttgacatgaattcgtctgtctcaatcatatgcctcctgcacctttttgccgcagcagtctgtaaaagggaagtttatgctattcaattctgtgtacacaaagagtaagcaaaagcacagcctgttgtccatttctgctagttggaataccaattattttgcaaaaccgattttgaaaggtgtttgcaaaaattcccgattagcgattaatgtctgtgcttgaacaggagatcatataataataagataaaagtgtgaactctgcaactggaccaaaaaaactatttattgacaaagattaattagcttatgttcaaaacaaaaatatggtaacattagtgaattgcacattgtcatcattgcctggtacaatttttgaataatcaacctaaatcaagtttgagttcttcactttcctcagtaaaaatccagtgcagtttcacagtaagaattttcaggcagattaaaaacgaaagttttgaattttgatctatcacttttagaatataaatgcagctatctctgatacataattaaagttaaactagatggctgctaagttcattgctctgagaaaaaaagaatatagcatccaaaaggaaaatgcacaaagtatctgcatctacaatctcacctgtaaatagttccggagtatgttttgtgcttcattggagagtatgtcatgcagtacactgaatatctgaactgcaggtgctaaagctggggcagcacaatctgatatgggaccaaataggtcagacaaaccagtaggagaattctcatccaaggacttgtaattttcaaacacaactgcaaggagactcttgatccgatcttcgcaatctaatagtatgcttctctgcaacaaataaaaaataagtttccataattattttattctttacattttattggaatcaagaattatcaaaatgtgtttatttgctggcatgctacagaacataattatatatttcaattgctatatctgaattcttgttaaatggaagtatatatgaagtaaatttagctaacatattacctcttgtctcgtcaaagtcctatcatcacgtgctttcattacagggagaagcagttcatatgcaagttccaagcaatcttttgttggtgttgcaacattcaaaatgtaagacaagtatctgtagaaagtaagatgcaacgttagcatgttttggtatattcagtaaccaatgagtgactgtatgcaacctaaaacaacatatcacctcaattttctatatgcgtctgataccccatagtaatctgaaaactcgtccaatagccatttccatgaaccactgacatgcaacattttgctattgaaattctgagctctcattgctgcttccagaaccatgtcatatacaatagtatccacagctggaccgccttgcagcatctataatgacaccatgcaaaagtttagaacatatgttggaatttttggtccaaaaatatacgagcatgaaaataatagaccaaccttcgcagctccttgattgtcagaagagacagagaagtttatacaaagctgaatttttcccacgcattcttgatcatcaagatataaaggccaccacttaatgatttcctcctgctgttttttttccccacaaacgtgccaagttgagaaatgggttcatgaaacaattgctccaaatgaaggtgagcaacgagcaggacatacatgagtatcagtgatcgatgaaacttgaatttttgcgcggcctatgacaaccctattattgtcttgtacttcgacaagaatagaatccccctggctctctagataactggaacatatgtattaagatgattaaataatgttctgagtaagttgcgtacttaatagattggagtagcaagtgtacaaaagaatcataactaggctaggacttacaagagttgagattcaccagtgcctggtttcaaatattgtggagaaatggaatctctctggttatccttgcaggagctttgcaattctagcgtgcatgtgaacatttctgcaagtaagatattgtgttactgattgtggcaacaagatctagcagaaggtgcagaacaaaagaaaactgttaaccttctggcaaagatgttgatgatgtggatgtcaacatggtaacctgactcttcaggattttagaaatctgtctgacatactcgctaccagcttgcatgtacagatttctaaaggatgatgttgcccgaagctttggtctttgaggtacaacacgtattttttttactgtatggaatgaaacattaagaatgtgagtgcaaaaagcggtttaaaatttggaaccacgcctaactaatcataaattcacagttttgctaagaaatttaaaaaaatgcataatgtacatgaaagatggcccatactgaagttcttgatgaacgattgtgcgtaccttcaatctcaatctgtttaacaagttttcttcccttcatattgcaactcccgtccttatcatagatactttttccgtcatcttgactcttgtgcttgggatgaagcaaaaaactctgtatcctattcatcaaaaggaggaaaataagctgagcaaaacaaggaaagcaaattggatgctagtttactgggaacataatgtcatgaatgatattttgcatacccaaaggcgcttctcagtaccatacactcatcacgaaggaattctggagcctccatgcagtttcttgcccatgcattcagacagatccgaaagcacgcatcatatgcaacaaaagattgccatgcactttggacactgataatttggaaaaaaaaaaagaccagtaagaacagtgagcagatgaacaacatcttcagggggtaagttcacaggtaaatcaaaacgcacttagccgtgaaactcggcatctgagctaacaaattgctctcgacgtacggcacatgaacaccatcttcttgaacatttgatctggattgttttttaacagaaaaagaacgatgtgagcaagaacaatttcatagcgtaaaagctaaaatactccaattttcaaccaccaactgacaactgtacctcgtaggaagctcaggctcatgaacatcctgggccagtatatctgccactgatgataccccagccctttcaaggcctcctttcgtttcagctgcttccacatgatcagataaatcatctcaaatctcaaccacttcttcaaggtcaaggaaatgatccagaatacaattccactataaagtaaacactcaccaacagtgtcaaaaatggcctcaaccccatctcctgcaattggaggggcacttggtgtcccaatggcttgaaatttttgctcaccaaaataatgttcctgaataagaaaccataaatttgccttttatcttcacaaacacaagtgcacaaactatgctaacttcgaatttccccaagcacatataagcttccagaaatcgatcacagttaaattatcatcaatgatcacagtgagagagtaaaacccttacatgcgaggtggaatccacggtattgttgccgctggagcatttcccggcgaaggcgctcgcggcccgcacctccacccgcaggttctccttggactgcccgcgaaccaacccgccgcccccgcccctccggctgagctgcgaggtgacctcgtcgtcgaacgctaccccgccgcggtccatggccctccggagcaggctggagtcgccgctggagcacgccccgtcctcctcctcctcctcgagcgtgtcggagaagttgccgtagtagcagtcatcgggcaccccccacgacgccacgctctcctccccttcctccccatcctcctcctcggagtccgccgccgcgagaagcacggagtggtggtgccgcccaagcagcccggagtgccgcgccgtggtccgcaccggggggaggctcttgggggagaacagcccattccccacacctccgccgacgccgacgccgacgccggagcagcccctcccgtacagcgcggggctcctcggcgccgcgatctgccccgcgggcagccgctccgccagcggcgacctcggcggcggcggcgcaggagagcccgtgccctgcttgatccagctgatcgccgactcgtcgagcccctccgtgaacatcatcctcgcgccgcctccggttgcgtggtcgccggattgggggattggcgaattggtggtctcggattcggggatggattggatttgggagtggattcgatttggggatgaattggagaggggaggagagggagaagggggtagtagtagtagtggggggagggaggagaggtggtcggcgagggtagtgggcgaggtggggggttgtaacggctagtttctcggcgcgtggttgaatggatcttgctgagctggatgggctgagctgggttgtggggcccatttgtcaggcagaatgggcttttggggctttgggccgccagttacaaacgggactagtgttgggatttcccttttattgttgcatgaaaactgaggtcctattctttttagctacttcattggattattaagtgattatttggtccatgtatattaataaaaataatctaggaaggctttcatccagggttcacaacaccgatagaggatcaaaattcgctcacaagtggtaccatcggatttcatggaatcaattcataaacagataaaaacttatgaagtccggataaatcttgtgaacaaaattaaaatccatttttaattttgttaacttgattgaaaaatcgagtggtttatgtttttgactcgatccggaaagtttgtgaaccctgctttcatctactgttgtattggttagaacactggttctaagctatcgataagtttacttttataaatattcaatttgtccatacaatcgagtgaataatctgttgaatagtatgttctaaactgagcctaaatgttctcttgcaaatttttataaaactctcttttctcaattttcctgggtatcaaacaaaatatttctcacggatgtttgcaaaaaaaaaaagccaaaatattttcagcagcatctatagaatttccttctgtaattttttaatataaaatttgtggtggtttaggtgtcacactcctggagttttgcgtttatgatgtagtacgttggtaggctaggtgtccttgtccttcctgttccatcccttttccattctttctctgctccgctccaaaaatttccatgtcccatgaaggcagcagctatagggacaggataagtttgccttcaattccaaccaactccagaagaaattaaaacatcgtattagttcttgaattcttctaattgcaacttggagagtacttatttgacttggtcactcttgaccttggcttccaatttgcaaattgtcctcagttaagcatgatcaaatttgcataaaattgtgatttatgtgtaccaatcatctatgcctctatgcagtcaacactaatccaaatcgatctagctagtgattaattagcactaatactaacaaactgagaatccaaagatgatgatgattattattagacttaattacaatttacagtaactccatctcattacagttagtaatttgttcctcatgccgtgtagtaattgtagtactaggtacaagcagagtaggagcagtaattattctctcattttttttgaagaaaaaaaaaggaagaaaattagctagccgtacggattttcagagcaaagccgccgccgcgaagctccatgtacagttcgccggcggcgagcgatcgccgcagctagctttagctggctcgacgccgtacgtcgacggcgatgatcaggagaggtaggtgccgcagacgcaggcgccggagctgcggccgccgcagccgcagcccctgccaccgacgaacaccggtccggaggaggagcgccgccgccgccgccgctccccgccgggggaggccgcggcgaagatgatcatggacagcacggacaggcagaggatgacgacgcagaacaccacgtcgccgccgccgactccggccaccaccaccgccgcgccgccgtggggctcgaacaccaagctcgccatggccaccaagctcgcttttgctcgccgccgatgagcaccaagacgacttgagacttgagagtcgtctcgctcgcgcgctttttataggcgatttattattttatttcctctcgtaataaatgctccagttttattttctataaaagaattatacacatagacccctcaacaatactttctccgtttcaggttataaagacggtttcaaatttgactaagtttataaaaaatatattcaattattaattaatgaaactaatttagtattataaatattaatatatttgtctataaacttagccaaacttagtttgactttaatcaaagtcaaaacatcttataactaagggagtatatttttgtgaaatggtactgaaatgcttttttttacgaaagtttgagatttggttggaatacagggtcggttgtgtaaaatctgttggtatttggtttgtgaatatttgtcatgtgggggctgccatgatggacaccatcatcagattccgttttgttagatgataacgacggcttaattgattgataacctaatactacaaaaaaaactggtactaccactctactctaattagtgacacattattcggtgctaatactagaaaattgctacagataagatacgtttccttcactgtcggcattattaaaataaataaataaaagcacacggatgttgttgattgcataagtcattgccgtccaataattaactaagtctgtccgtttgaatgcaatgttgtcacgccgatatcgtcaactaataacgctgttcccttatgtaaaaggctatgtatgtgagcttttcttttactaggtgaaaccccgtatgctactgcggaagttcagtgtaataacaataagtaaaaataatgtgtaagatagctaaacaatataaacttatataagcactaaaatcaattgatatgatatggcttaattagataggagagaaataacattaaccaagtgagataaacttatataggtacataagatattagaaaaaaataatgaagatatatattgaaatatttcgtgaattatatgggatgatgatttaacatgctttcattttaaaagctctaaaatgtaataaattttaaattatagataatatatcatgtttgcatgatattaaatatatgactgttagtggatgatgatgtgtcaacttgttagtggatgatgacgtgacatctttgtatgttaaggtttagcagttagtgggttataactttatagtaagataggatttatagaactcttgcaaattttgaagtggcatactataagtaaatttagatttcatgtaatttgaatctaattaaatttaatggtttaaacattgtttctaaaggttcttttaaagcacgggattaaaaaaatagagcattaggaaaagcatagtatttcatcatgaatgcaaatgcaaaacacattaagaaaacacgaaaatcatatgaaatagataaattgggaggaaattttttaagagattgaagctcttgctaatttcctccaaaatctctataggattttttttattctataggaatttcgaaggaaaatttgtagaattcaatcctttgttttttttctatagaattgaaatcctaaaactcctatataacaaaaaaaagcttaagagttttctaaagaaaaatattagatacagcgtgtaaagaaaaagagtcttgtactgctgctgctgctaagaatttgtgggagaactgcaaagaaaatagccgcggttaattagaccctctttgtttaggcttagatttattggcctagatttttaagtcagcttattggcttatatgatttataagccagtggatttaatgtcctaagtttagtggtggagtcatacatctatctcatataagccaaaaaaaacttctccaacctagcttttgacttaatagtgttagagtggcttatgacttcaaccaaaccaaataaaaaaactgcttgtttgttttgtcttagacttttcgatttataaattggcttataagactaaaggccttagtatagtcaagaacggacttgactttgtggttagggtaggattagtggaagcttttgtcaatattgagaggcgcagtgattggttgactggatgagagtagtagtagttgacactgacactttagcggttgggagggaggcgagtaaataatttactcatcagtgtggttgccagcctaccagccggccggccgccaggaccaaaaccagcggacgttttcgaggggcgcagctccgggctttggctgcctaccgtctcgtggatgggccttaatttgattcgttccaaatttggaagcccaacttagatttaatccgggatacgtgggccagcatacgaagtctgcaggaataagttcactttaggttccttaatttgtcaccgagtctaaaattcattccagcatgacaataccagatatgacacattccttaactttcaagaccagtacaagtgatatccacggtttggatggtagttttgaatgatgcctacgtgatgttgacttgatacaagtgggacccacatctcctcctccccaatcccccctgctcaagaacatgccaatgctcatggtcttcatgcccttggggcactcgtgcaagaagaagtctagctgccgatgtatgtgaaggcctcgcccgcaccaagatgaactgcaccaggagagaaaatacggacagcgtgatacccgagacggcgacgctgctgcacgctcagtgagcgtggcaacgaccatggtgagggtggcaaggagggtacggggagattagggaggaggagatgcggatcatacttgtaattttctttatttttaactgaataatcacttacatgtgggtccacggttttctctgcttttaagtgctacgtcaacgctacgtaggcatcatgacatgcgaaaccaccatccaaaccatattgggatcttatttgcattggttttagaagttgatgaatgcatcatatctaatattgcggttcataaatgaattttagactcggtgacaaattaaatagcataaagtgaacttatccaagtctacttgtagcacgtgtgttttgtggctgaattaaggatttatcctcttggctcacgcaatgacgacaatacatgtcaataacaactcaagaccatgttattttgtggggtttggaaccctttatcttggtatgcaaaacaagaggtggatcagtgtacaattaattaagcatattaactaacaaaacttggaaaacaaagtaatttgatttttcaaaatattttttctatataaacttttttaaaagcgaaccaattagcagtttagacaaacacatgtgtgcaaaactaagaaagtggaagtttaaaaggggagaaaataacccataaaaattccttcaatgaatttagtaaagaggaacaacttgctttacaatatttttggattcttttttcactgacacataaaaggattgcacattatattagaaagggcaaatgttccttttcatatggttgtttaaaaattgaactagctgaacatgcgacagctgaatccggtggaatcaaacaagcatccactgtattttgcatttgaattccaacgaaatacaaacccacagctaaatacaggagcaaacagtaaatgtttcacaaaacagctcgagttctaacaaaaaaaaaacaaaattcgcacccccaaacacgaccaacaaaacaaaacagagcataaacagaaagcaaaacgaaaaccgggtaaataatttcagatttattccctccaaaaaaaacccaacctaagatggggtggaatatattctagcacaatgcccgtgtttatttcacgccaaaattgaatgtttggttgaaattggaacgatgtgatggaaaaattgaaagtttgtgtgtgtaggaaagtttgatgtgataaaaaagttggaagtttgaagaaaaataaggccaatgtatctggatagatgtagtatgttttaggttagaatttttttttaacggagggagtagattggataatgcgactttctttttttctcaaaccaagtaggattcttttccacttctccaagcaaaaccaaggaaggaggcaacctgagatttgacacccgtagactctcccccgagcccaagcaaggcaagtcccccacaccacttcccttccctctctgcagccgaggcggcggaggagaagaggagctcgatcgatcccccccaccggcggcggcgggcgagatgaaggtcaccgtgatgaccgccgacgagcagattctcaccgtcgacgtcgaccccgacgaatctgtaagcccccccgcgccgccctcccactcgtctcgatctctgtaactggggggcgtcaatcaagacgggttcctttttgggacaaattcggttcatctagtggcggaattcgttgggaattcgggtgcggagcgggcgcatttgagttgagaggcggtcagcgattcagttcttgtggtgtgttggatcgtcggttggtgtacggattggatggatctttgacaggcttcggttgtttggtttggtttagagcgtcagtcccttcgtcttcctcgtgctcttggtataatatggttgtagagctagattttgtagaataccttggaactgaattgtggtttagaatgggaaagatgcagtttttggctaaattgtgcgtgctgtgttcttgcaggtggagaatttgaaggcgcttcttgaggtggaggtgagctgggactgtaatcttgtgtgagctatgtgtttaaggctctgcagctactgggtttgatctcactgttctcacattgttggttttttggctgcttgtggacagactagtgtgcctttgcggcagcagcagcttcacttcaatggcagggagatacagaacacggataaacttagcaccgtcggagtccaggatggcgatcttgtgatgatggtgaaggttacctctaatgaaaggtctgcttgctggcattcctcgtgcataaaaagtaaattgatttgcatgacatatacttgtaaagttttttaattgagttacttaagagttttacattccgaattgaattacttaagagttttacatccttcagttcaattctggtcttactggcagttacctcctttgtagttgtccagtattactttttgcgcaataaaggatttttagtttgttaaaactgatgctatgaatcgcgatgccactaaggtttcttttctccaatttaatttgtctgggttgaaaatttcaggccatctcaggatattataagattaaaccctgatggatctgctgttgatcctcaagctttccgacaacatattcgaggtgattcacaacttatgggacaactccttcaggtaaattttactggtagcttcattactttgtggctggacagtttatatactttaatgtgcttagatatcacttggggcaaatattttcttttcttatatcggaaaacggatatttatttgcagaatgacccggcattagcacaagctattcttggtgatgacatcaatgagttgcaaaataccttgcggtcacgccatcaacaaagactagaactaaagcgcaagcaggaagaagagcttgtgagtatctaccacgagatagcattacttttaaagggagaatattaagggggcccttatatgttaccatgtctttgggaactaaagctgagattgtgtggtttgttcctgcatgttactcacagcacagttaaagattttctattctgcagtctttttatctaaaaaatgatttagcctttccttgcatttatataagtatatatctctatgatgtttcgtgtgcattgtattttccaaaattgcacttttgacttatcttacatatacttcaccacttcgaggcttggtagttcatgatttgttggttgtgttgtgttactgtcttattgattaacgttagaaaattcactaataaatgtgtgttttgcaggctctaatgtatgctgatccttttgatgttgaagctcagaagaaaattgaagctgcaattcggcaggtaagcatatttttttctgaaacctgttgaccgctaggtgatgattcctttcgcatatcagtggacaagtgtgagatatcatgaacatcattacaatagtgactagtgttaaggagacataaagattctttattacaaagttaagaataaacaagataacttaaatataaatttttctggctaccatgcttggatataatgaattgttcgtcacagcattctgtttttctacagttaaaaaagtaccttttctgatttcactatgattcatactttcttctctactcacctgttagaatttatccagttagatgtctgattatgatactttaatttacttgtcgcattacagaaaggtattgatgaaaactgggaggctgccttggagcacaaccctgaagcatttgctcgagtggtatgttttaccttagttttctcctgttttacgttctatgctttgtgatacttgctaaccaattagtattctgagatatcaggttatgctgtatgtggacatggaagtcaatggtgtacctttgaaggtattactctttcacatttatcctatataaccaacatactgagaattaatgcattctggtgaaatttaaatatttgagaactaatgtaggcttttgctgctctttttttgggtgcaatgttttaattcttctcactgattgtaaggatatgtttaatgttccattgtttttttttttcatcttcaggcctttgttgacagtggagcacaatcaactatcatatcaaaaagctgtgccgaacgttgcgggtacacttgcaatttaagatattggttgattggaattatttaaacttttatagtttgtatagtaattctgcatgggaagacataaatattgaatagcttactttaacatttttctctgagacgggagaaactaaatcagtttctcttgatactcaactgaaatgtacaccattgcatatttacatattgtgtatacatctgacaaagaaatatcatatgcaggttgcttaggctgcttgatcagcgatatagaggtgttgctattggcgttggtcaatcagagattcttggtagaatacatgtagccccaataaaggtatgtttgattgattcatgtacccatgccactgatattacagtgtgagagaatatattatttatatgatacaaaattcatcacctgggtagaaaacatgaaattccaggtcccatagaaaccatgtgacaagtcctagtataacccaagtctttggtgttcctttagaacctagcgatttcagttattctcatacctctacaaacttcaatggttttgcaatttgtgaatcgtgatatgtaattccgtactaattatttagcagaagtagtttgtaatgtaaatactgacagcttgatttggacagattggccatgtcttctatccttgttcattcacagtattggatgctcccaatatggaatttctttttgggcttgatatgctgcggaaacatcaggtaatcgtgtgactaagatctggtacatgctgttgcatctaaatctgatagtctgattacacttcttactgattcttttgttatctcacacagtgcataattgacttaaaagacaatgttcttagagtaggaggtggtgaggtttcagtgcccttcttacaaggtaagtaattttgtatcaacaatgcattccatttttataaatgtacttttcatgaaggtttactgaaataaagctaccaaagaagttaatttttatagttccctcctcctagactttcatctggttatatacttatgcagttttataaatttagttcttcaaccactctgctattctatcttcagagaaagacatcccttcacatatacgtgatgaagagaaactatcgaagctagcatctctcagccaaggagctgctggagtaagctaaattcgcttttgctttttttccttgaattgtgatttgtaacatcaaaatatccttatttactccatcttatccaggaatcgtcaacggcacgggagaagactcctgatgcgccaccacgagctcctactacaggttagtttgcttttgctctggtaggtctaggactgcgtaatctatgccatctgataacttcgagctaatgagaaacctccatcttttcattttctttccaggtgctccagctgtgaatcctccgcaaccacaggtagtcgagatctcttttatttttgttaaacttttgtgcatcaaattgattctgactgtctataaaaacatctaccagggaggaggagatttcgaagcaaaagtcacgaaactggtggaacttggattcgaccgggcatccgtaatccaagctctcaagttgttcaacgggaatgaggagcaggctgctgctttcttgtttggtggttagagtcttgtgatgatgatttgagagagttctttctattgctcacgaccctttcaagggctgaacattttatacacagtgatggagggagatatcagtatatcacctcttgggcctttgtgaaactagaacttctgtttggccaatacaggcttttggtttagagatgatggttcatatttctccttccatagaaaacccattttcttgccttcagtacctgatacaaagatcatgtgcatttcgatctcatttgtttgccaatgatgtgaattattggtctcatatatatggtcctcacaggtgaactgcaatcaatgtactgtcgattgtcgagtttttctgttacaatgtgttgtcgattgtcaagcctttcatcatgttgtactcatttacatctcatttctcaaatatcaatcaaatggttataaaagatcatgcaaaaaataaatgtcaaacgttgatctacacaaagaaagacaacaaacaaatgcgattctttatactccatccgtttctaaatatttgacaccgttgactttttagcacatgtttgactatttgtcttattcaaaaacttttgtgaaatatgtagaactataggggctgtctatacatcttgtgacagaaaatgtcaccccatatcattcgaattttggaccattggatatgcttcaagattcgtgcagaccgttttaacctaactcctctcctcctccccaccgattcagatcgcacgccgccaccaccccgtcctcgcgcgattccctccaccaccgctcgcctcgccggctagctggaaggggtcaacggcgccggcgaggccctctccccttcccccaccccctccccctcccctcctctcctcgaggtggcgacggcgaggtgcccccgcctcaccgtcttccccgtctccggcggctccccgctgtcggatccaccagcaccggccgcctcctcctaatctcacacttgctttgcccccgccgccaacgccggcccaccgccctccatccccgcggcttcggcggcgccaccgccgcctcgccgcccgccggagtccgccgcccgccgccggtcctccgccgcccacggccatccctctaagcgccgaggaaaccccccctcttccccctcccccaacccccctcggccctcctaccctcaccccaaccccaaaccctaacccgtcggagttggggtgtcgccggcgccggagaagaaggggaacccgccgaagttagaagagagaagccgacacacgaatcttggcatggatccagtggtccaaaatatgtaagatttcttccccaaatttcattcgaatgacatatagcaatcccgaaaactatatgtatacataaaaatatatttaacaatgaatcaaatggtaggaaaataattaatagttacttaaattttctgaataagacgaacaatcaaatatatttaaaaagtcaacaacgtcaaatatttagaagcagacggagtagttaaatttgtatattttttctatgatatgagatgtatagattggatttaaattctagtgttgcatgcttgtggagtaacatataacattgtactgtaacgtgtattattattgattttcttttcttttttcagaattttccatgactttccgagcaaatgcacatgaaacatttagattttctgaagctaaagaattcaaacaaacgtttaattatgtctgcttctttacacaccaccacccctcctaaacctaattaaatcgattaataattaatcaaccaataccctatatataattaataattattaatcacgatcatgccatcgtcggcgtcgtcgtcttcaccacgagaggcgacctgacgaactgcttgccgttggtccagacgagcgcgccgaaggagtaatccatggcgagcgacgcgttcgtcacctcgaacctcacctggaacgtcttcttctcccccttgagcaagaacggcagcgtgtccgggctcaccgtgacgcgcacgccggccggcgaggtcacgtacgccttgtagacccccggcttgccgacgttcttcaccgtgcgccggacggtggccgacgaggtgaggttgacgacggtgatggacgggtagttgaggtcctgcaccttgggcggcgaggccgggcaccggaacggcgccgcgccgccgccgccggcgaacatggccatgacggtggcgttgtagctgagggagcagaggaagttgaggtagtcgacggcggcgaggtcgtagacgaggcccgggttcatggcgcgggccggggagacgtggccggcgccgaagccgaacgggttggcggcggcgaaggaggagttgaggatggcgtgccgctcgttgtccacctcgacggcggtggtcatgagcgcggagcggatcgccgcggggctccagtcggggcgcagcgtgcggagcaggccgacgacgccggcgacgtgcgggcacgacatggacgtcccggactcggagttgaaggcgacgcggcgcttgtcgaaggcgaggtccgtcggcgcgctggctcgcgtccacgccgccaccacgctcaccccgggcgccgtgatgtccggcttcaggatccccggcgtcaccgtgttcggcccctgcgacgagaacgccgccatgaaaggcgccggcttcgtccccagcctcgtctccggcctcgttatcgtccccgccggactcctaaaacacaacccacacatcagcgacgccggcgagcaaatcgatcaacggcgagcacaatgttttcggctgcttgattacttggtgttcttgaggtaggagaagaggatctggccgtcgctgaacttgatgtgggtggcggggaggacatgggcgtcagcgatgatctcgttgccggtggtgacgtcgttggcgagcaccatcccggcgccgccggcttccagcaccgcctcgcccttctccaccctcgggttcactcctctcaagcacaccacgatcttccccttcaccttctccggatcaagcgatcccaggaaacaaagctgcctgcatctcattaatcacaccactaatcacacactaatcacaattaataatcactaatgttaaatataaaatgagttttccgcctttttctcatcagcttactccctccgtattatattataacgttttgactttttgagtagtcaaactattttagtttgatagtttatagaaaattataataatattttcagcataaaacaaatatattatcaaaatatattcgttatatttaacgacactaactcgatgttgtaaatgctattaattttttctataaaaagatcaaacttaaaaagtttaacaagaaaaaaagttaaaatgatttatagtatgaaacgggtgagttgatatcagagtagctctcgagtttgaattcaaattaaataaagattgcatgttgacttacgattcgttttgagtccggttgggagaggcagctagggaggagtcgatcatggggaaggagctcgacgccggcgagagggcggaggcggagaggctctggcccttgagcttggtgtcgttgaagacgacgtaggcagggaactcgcggtccatggtgctcgcggcggcggtgaagagccacggcgcgacgttggagacggtgccgggggcggggcccgagttgccggcggagcagacaacggcgatgccgtggcggacggcgtggaaggagccgatggcgaggccgtcggcgaagtagtcgcccgcgtcgccgccgagggagacggagaggacgtggacgccgtcgtggatggcggcgtcgaacgcggcgaggatgtcggcgtcgaagcactcgctgccgttgacgggggtgtagcagacgcggtacgcagccacgcgcgccatcggcgagccgccgctcgccgtgccgttgccgtagccgaagacgctggcgccggccaccggcgcgccgcccgccgtggagagcgtgtgcgtgccgtggccgtcggtgtcgcgcggcgtgtcgaagagggaggtgttgaggttgcccaccgccgacgcgtaccccttgttgaagaagcgcgcaccgatcagcttcctgcaattcaaatttatatctatttatttttgtttatttcaaataaaaatcattttatttgtgcatgataatgtttagaaaaagggtttattcagtctctattctacgaaattatacattcaaaattataaataattggaagtgttcaacttgtttcagcttcctgcaattcaaatttatatttatttgtttatttttttcaaataaaatcatttctaaggtcctgtttgtttcagcttaagattattttaatctagattattaaatcagattactctaagctagattataataagttgacatagaataagctgcgagctgtttgtttctctagattattggaggcatctgttggtatttagccacccaataatctaaaaaaagcttctccacaggagattattagattatagtaatctgtcttatagattataataatctattatagtaatctacttgtttgtttcagcttactcctaataatccagattataataatcttaagctgaatcaaacagggcctaagtgtttatgatgtttataaagaagggtttattcagtgtttgttctacaaaattatacatgcaaaattataaataattggaagtgttcaacttgtttcagcttcctgcaactggatttctccccccacaaaaatcatttttatttgttcatgataatgtttacagaaagggttcactgtctattacaaaattataaactcaaaactataaattggaaatattcaactggttaaaaaaagagagagattcaaaagcgtaaagagctttattttcagagaaaagccatccctgaggggtctgtctatgaatatgtttgtagatgcatagactcttctgttaaacaataaagactaaaagagtataaacttaagatcaggaatcaggacacgacattgataaaatgcaaatatattgtgcatttccttccccaaagttgccaaacacacagtaaacgaaaatgacattatttctgaaggggaaaaaaaaagaaaaaagtgcactgaatctccgatcttcaccgagataattcagatgtcttcctttcgtagtgtaactttgccatctctaaaataggtctagattaaagaaaattctacaagcagcaacatattgtttgtttctttgaaaagaatgtttataatgttatgataaaagagaaaaatctttaattctatgttttttatacactatacgttccacatattttcaaaaatgtcactataaatctaaagtgcctttttttattcggttgcttgaaaagtatcttccgtaccatggatggatgatactgaatgttttgtctctctcagaatacccataacattctggttatcttcacatcaatcagtacagtacttccctttttgtcattgccaaggaataaacttttattaagaccaacactaaaaggctaataacattaagtaatcctgtttgttcggcttccttaaaaagccgtatcatttgaaatataatggtgtcagtttttttttcagagattaccaaatcagaccagagtattcagatattcagatgaagcttctccaagttcttgtttttattttcctgactgaatttttatcctaaaactgcggttgagacacaccatcacttggtgtcatgtcactttgcacaccatgcctgaatgtctatctatcattgcaggttgatcagaggggcatcagctggtggtggtctcacaggcatgcatattgtggtggtctcaactctaaaattggtagtgcttcacactacaaaggagaaaaaagtatctcaactttcagaaagaaaagtgctgagatgctcatgctcccctattctagatctgaacaacactgcaaaatctttctccaagagaagtaattgccccatctgaatatgcacgcttgtgacatggaatgcaacttagacaaagtacaagttcaggttcaggataacaatccaatgcaagaactatatcaatgtatatgcataaaatatgtatgagaatgaattggattagttcaggttcagtctgttaattacctgttgcaagagaatgcatcatcttggcctttctggcattctcctctccaccacgatggaataggccccaatccatcatccctgaagctctctgattctggccacacaccttcacatccaacacagccacacagagagacaaaacaattcatgccaaattccacgaaacagtactgatcaagctacaatcagacatggaaaaaagaacagtcaaggacagtgatcactgacatcagtgtcatgatcaattgcctgcttaaacaggcaactaccaagccattgtctgcatctaaaattctgctgttgtgtttaccagcaaggagcatggaggacaaaatggcaaaggaaggaataaaattgtagtgtggttgcacagataggctgccactatcaatcacagtggccaagaaaatccaaatcattgaatagtcctgctcatcctgttttaacttccagctagattggttgatttgttaattgttgcaagtcaaaaacactgtaccttccttgtttcttaatcagatggtgtgatggatgaatgaatgaatggatcatgtgctttcatcttctttcttaatcatgtggagcatcacagcatgtgcttcttgggttagaagacagaaaataaattttcataaaaaagagtttaggtgctcaaccatgaatagtttagttaagatggtaatcattgtcgaagtatctcggacaggggtcttatggaatgatctgacagcatagcaccagtttttatttgtccactagctagaatatattattatcagtacataaaattctaggtacgttgatttgggtaaaatttgggtatatctgaattttgtttgcaatcatgtgactattaccataatgattccggccatttaattttccaattttgacagtatttcaaataacaatgaaattcctactatagattgttttctattgaaaagagtcacatatccagaaaccagaggtacaaacacactaatttcttatagactaggaattttaaccgctcagtaataatctaccggtgcgtcgaaattcatgatatgaaagggcatttttgtcggaatttgcacctaactgtatctatttagtcatcactttaccttttagagaaaatagtactattttacaaggttacaaacaaaaacgtaatccatcgcaaaccaggtcaattattatcttgataccttccatgtcacatctagaaaaggagataaaagttttttgaatggatcacaagtagttgtagtaccctcctaatgccgtaatgccgctaaataaaattaaaaattgcaccccgattgatcaagtcaaccgagcaattatctcacatgaaaagatttcgcgcctaattatcgagttaattgattcttgttacccctccatcccaaaaaactcaatatattattggatttgatattttatagtaaaacaaatttggacggaagtatgtccagattcgttgtactagaaaacgtcatatctaatactagattaggttttttttgagacagagagagtactagcagagagaatcttatcgtgtccggccactgctccgacaacggcggctgcgccgccaccgacatcgccgccattgacaaggaagctagagagatatggaggtggagagggtattatagtattaccggtgtcgaggttgccgatgatggtgtcctcgccgaacctggccttcttccaggcggcgccggtgggggcgccgccgacgccggcgaggccgaggaattgccacgaacgcgtcgtgtgcagcttgtggcctctgttcgggaacaccgacacgacgcccggcttctctgcacgccgtcgccgtcgccatcgtcgacgtcgaagaagagtaaaagaagaattagtctctctctcactagcgaacaagcggtcgtcgtcgtcggcgacggcggcgaaggtggagtaactcaccggcgatcttggcggcggcggcggcgtcgaggttggccgcgaagccgttgatgtggcgcgtgtacgagtagaagatggcctcccgcgccttctccttgctgcatttcccgaaatctcgcggtcaaaactcaaaaacccaagaaacaatctcatcgacgtcgttaatccgatcggcggccggcggccggcggcggcggcttactctccgaggacgccggcgaggagctcgcagtgcgaatcctccgcctgccgcgcgagcgcctcgacgtcgacgtcagcggcggcggcggcgcccagccgctcgccatgggcgtgctctccaagatacacgacgtacgactgcttctccccgccgcccgcagcagcggcgccgacgagcagagacggcagcgagcagacgagcagagacggcagcgagcagacgagcaagacaacaatggcggcggcggccatggcggcgagagggattgaggtggagaggatgggagagtacactgtcgaacacctcccccgagctcgcgaatttatagagaaggtcgttacaaagaacagcctcttgtgcctcctgtaaaatcgtaaattttcctcgtaaatcgcgcggatttccgtttgagatttgttgcaaagattgctcgaattagttagggaaaggttttaaatcggtttaaactggggataaatatgaattcttttttccaatcacggtttcatttatttatgtcattataataaagagaaaaaaaaatgcttctagagaaatacaattctttgctaaagaaaagaagaagagaatacagttgctttcatctcatgaccttggtgtgttcttcaaagatcgtgcaattcagtcgccaatgatgttgtaaataccttgtttgtttgtcccatggtttaagactacactatttgatactgtcatctttaaagtgtctttttaccacacaatttactatcaaatataaaaattttaatttaataataacgttatgaaaggataagttacaacttacaatgtcatttgcaaatatacaaattacatatttcatacaatgtttttagttaaaatagtacggcaattaacatgcgcagaagaatacatatcacctttttttaagtggggagggaagaataactactccctccgtttcatgatgttttgactttagctaaagtcaaatttcttcaagtttggctaagtttgtagaaaaaaacattttcaactcaagacagatttattatgaaaatatattcaacaatttatttaatgaaactaatttggtattataaatattactatatttatccataaactttgtcaaatttaaaacaatttgattttgatcaaagtaaaaacgtcttgtaacctgaaagggagggagttgttactaaggtgacaatgcatcacaagttcacaacccgctataagagacagatcgtacgctaacgaaaaaaaatgtaatcgttgaatattctatatttttttattacataaaagatgcacatatatgtcaccatacagaattgtgctctccttcaacacatgctaaaaatttgtaaacataagtaaaatcctattaaaaacataaggacgtaattaaccaatcgagttggtgtgctctgctcgtagaggcgaaagaggacgtaatagagtggctcatgatcaaattagatcaattagctaggactagacatagttcactatggagactagatgcttcaacttgtattcatggacttgtccaataagattgtaaccactctgttaaattaataaaataaccttttttcttaaaaaaaattcatatggacgctagggtaatatttgtgtcggttgagtacaaataattaacgatatcaagctcttgcaccgacatgtaaaatgttcacttgtatctctattgatttctaaatcattgaactaccttaccctccttttggtgtggatatataaatatctccatcaaatattcaaataaatttttaagaggaacaggaatgtaccacgtcgtcatatattgatagccatctgcaaatatgttgagaaggtttttgaaccgtgcattcaagggatatataatcgaatacatctctgtctaatggatcatgcgacttaatactccacaatcatgctttaatttggatttgattgatctgttgcttcaccacgaggttttcctttctttgccatcacatcgccgaagatttgtgtggctacttgatatatttgacggtatttgaggagatacctcgtaaaatttgctaagattcaatacttcaaacctaaggtaccagattttttatgtcaaaaatttgcaaattttacattatggaagtatgttgtatatattttgaagaaccgtaaaatttatttagtcatatatgtatctccgtcaagacggctgaaaattacgaagttacagctaataagtagcatttcatcaacgatgtaatacatcaagtggacggcaatggcaaggttaacaaatggttcagtttgtattctgggaaaacaaaatggacgctagctgtacaggctaaggtaatttagtcataagagagtgacctattaatacctactccctctgtccaatggtctggggatgaatctggatgaggattggttttttaagaaagagtatatatagaatcgtattaaatcactttattgccatgtaattaaggtgacgatatccaagtagaagcatacaactacaagtggcccaagtatatgataatggtgtactatatactccttccatcccaaaatatttgacactgttgacttttttaaaaatgtttgaccattcgtcttattcaaaaaatttaagtaattattaattattttcctatcatttgatttattgttaaatatacttttatgtatacatatagttttacacatttcacaaaagtttttgaataagacgaacggtcaaacatgtttaaaaaaatcaacggcgtcaaacatttagggaaggagggagtatattacaattctatatatttatatcaaaataagctgtcaaagtctcaatgctgtacattttaagtcatagatatagctgtgccatggcaatatctccaatcacgaaaaaaaatgttgtcaacattgatatatacaatcttcaaaattcatatccgatcacttttttttaattataatatgcttaataaacacaatgaaaataggcactccaggaaaaattaaaggcaatgacccttgataacatcaaggcatcaacagtcaacacagccacattatattgtagaattttattagttcagtttttttatccctcagcaaagagagccagttattggagtgtagctattgcattggtgccggccttagcttgttcaaaatttcagaggtgttcaatgaattcttcccaaagtcaatgagggaaataaaagaaataggaaaaaacagtacagcactcttgcctatttctgcgaatttttttaaaaaataatacgattttaatagaaaatcgcaaaaatataggtcggttcgacgaaatcgtaaatttagcaccctgtcgaacaaccgtgtctcgatagaggtacttatcgaactatggcagtttgacatgtacctgtcaaactgccatagttcgatagggtagttggtccaagggaaaaaataaaaaaaggacagtaacagtgcctggcaggacatatcgaacaagcaaacttcgatagggtggcatgtcgaacagcccaagttcgatagggtctcagctacagtgtgctacagtgtttttcctctttttaaaaattattttatcatctgtcgaactgccggcaccctgtcgaactgcggttgttcgataggtaccctgtcgaaccacggatattcgatagggtgccaaacttgcgatttcgtctaaccgacctatatttttgcgattttcctttaaaatcgtattatttccaaaaaaaatcctatttctgcttccatatcgtcctttccaagaaattaaaacctcatgaatttcatgtggaaattctttgccacacactgcgttaaaacctcatgaatttcatgtggaaattctttgccacacactgcgttaataagtgtaaataattaattttatatgtagacaaacattggaaaatcttaacgcgcgattccttaattactgtactgaagctccagcacgagtgttagagcacccgcaatggtaaaggaaggtgttatctataaaacatgtacatctcagcaatagactagattaatagtaaaccacttcaatggtatgtctacatgggtatctatggctctctaatcaattgcctcgtttttctctatagactatctctatgttagtagatagcttctctctcttcatttaatctcttctaagtagaaaaatatgctgacatggatctcttgtagagagcttatagataatcattgtgggtgcctttagccgttgctccgtaatccacaaagctagtaggatattctgactgaattaattaacatgcagtagtatatactccatctgtccttatatttttaaggattagaatatgtcacatctctctaaaaacctttatattttaggacggagggagtagtatgaatgatggatcctacgatatgtggccgacatatatggattatatcctttgcttggagcgcattattaatcacaaagaatatatatgcacgcaattgatgctaataagtaaaaaaaacataaaaaggatatcgctcgatggcacatgctggctattaaatttgctggaattctctgaatttttatctatacctttttatttgtaaataatgtcgccattcaaaacactctatacatccacacattttcttcaaaaatgtatctacacatggtccatgtagtcccatctctcctcatccctccaagaacaggcagctagctgagatcatcgtagccttaaaaatagagatgtactctctccgttccaaattatagcaatactggactgaacgaggcacattctagtacaacgaatttgtacagaggtatatatgtctagattcgttatagtaggatatgtcttatccagtcctaagttgttatattttggaacgaagagggtatatatagttgcagcctatttcatcttgtgctcaaaccaaacatgtctacgatgccgagataatcaacaaggggtgctgctacagtagagagtagaaatctcctctccatggtcaatagatcctgatcttcccttgatggagccgcaatgcgccgtcttcaacggtaggaatgtactagtagctactactagctaagagctagcaacacacatgcagcacgcctgcaaattaattaaagtgtgcaacctagctggctactgaccaatgcgagctagaagagtagtggaattgtggaagaactgtgaattatcaccatgaattcagctagcaatgtggattacgactgcaccgttgcgctgaccataccaccactcattcgtttcacaatactttaggttaaaaccaaaggatccttttcaattggttgaccattgcattgttggataggggatattggagcacattgggaaggggatttgaagatcactcctgcagccttagtagttttctactccgggaaacatcttctactaatttaaagcatactctcttcgtaaaaaaaaaactcaattatgaatttgaaccgtatgtccaatttcaaatccaagattagatttttttttttaacagaggaggtatagtgcaagcgaccatacaaccaatgtgtaggacttccccaaaatcgatgaactgaacttcacatcacaatgtagctacaactgaccacggaataggatttttataacgcaagtgtatgtgtaccgccatgcgagccattggatgttttgtggaaattcgtgttgtaatgaactgcgctatgcacataaatcttaaagcaaatatgataacatagggtgtgtgtgtactgtaggtgcacatatacttgcattgtaaattgattttctcgcggattgacagcaagttagcgtgtgcataaccacattccatacaaaattatccacgagaatagcgagactaaaattactaaattaaattcctgtatcgcatcacagcaaccgcaaactgtcagaagagtgtgctttactgaattccaaacaaagaatcagtgtgcatgacacaattgacgcagtgtacatgagtgttaggcccgatccaacaattaaccagtaggactcgtcgtcgatcttgtcatatctggttggcattacgttaatttccagccaatatgcatatacgacttgataactatgtaagtcagaactaggcaacaactaatggtggcgcagcaagattacattgacctgtcttttgccgttttggggcgaatttgcagtgcccgtcggagtattattcagggaagtcggcgtttctgtcgatatataccatgcgtatcactgtcacagctcaaattaagatgcttttttttttctgttcaaatgcacaactgatgactatactacctctgttttctaatagacttttcaacacacgtttgattatttatcttatttaaaacattacataattatcatttatttcattctaagttattttattactaaaattactttatgcgtgatttatatcttacgcatttgtacatttatattaataagataaataaaagcatgtaccaaaagtcaacggcgtcaactaattaaaaaaaatatacaagtacttcctttgtttttagggaaaattgtaaccatgccattataattttgtaaaatttgagatatgacatcgttgatctttttagatacgtttaactattcgtcttagtaaaaaatatataattatttattttgttgtaacttgagtaatttatcattaaaggttttctaaacctgaattatatttttattgtttgaaaaaaatcattatttgcaaaaaaaaatgatgaatgatcaaacttatctaaacagtcaacgtcgtcatatataaaaaagatatactctatccgtttcatattataagtcatttgattttatttaaagttatatcagtactggccaaatcacaaatgcgacgtcaacttaacaaatgtattctctccgtttcacaatgtaagtcattctagcatttctcacattcatattgatgttaatgaatctagacatatacatctatctagattaattaacatccatataaatatggaaaatgctagaatgacttacattgtggaacggaggaagtacaagctagcttgaccaaacttttgccaaatttattccttcaattatatataggctccgtaggtttgaaatgcaggaatttaattcgctcaaagctagcgccaactaatctgatgatctctgcagtaaacaagcctaatttcgcctgaattaatggacacgcacgaatggctatcagtgcatatcgactagtatgaattatttaatcgcatagatcagcaggtgaaagtttgaaaaggtagaattgtgttaattaacagtttttggtagacgacctgacgaccactgcactgcccttgcgccgtaaaagtttgaaaaatcgcaagtgaaggtcaaacaaaagaagaagcagattggccaggtaaaacatcagcaggttcaactcatgtaaattaatataagcacgtacgcatacgcatactagtgcatactgcatacatcatggaaactttgatcgtgcttcttgctttctaccgcatgagtatatagtaggggtacaaaaataaacgaagcaaaataaaaaaaatatgtgggtgcaatttttaagggaccattatacttattagttaaaatttaaattttcaatcttaaatttagagttgattttagggtttttcatcgaagttttttcggcctttgtttttagctcgctaagaattcgtatataaaagttttatttataaattatttttcgtttacaaatataccgcttggcttattttatgatgtggcttatagggcctcgataagcatgtgcgagctatgcgatggaacctgaccttattttttttatactttaatcatggtcacctgaaataactatggagatcatgattataatgtgaacgcgcattccaagcattaaaaatcccatttttccacttaaattccacttagcaaatgataaatcactgtatcatatcatgacatagttctttgctgaatatatatagtaagttggagtaaaagattttaattttggttactgctgattagagcccaaatcatccttctcattagtgtccatataagatatcagaaatatatatagtaaagtactattagcatgatggcgaagtcatacgcgcgtgttctttcatgtttcgattacgtatccttgctcgattatgcataccaggtttatttttttttaaacacagtacaaacgcatgcgctcacaacgcgcgcacacttactcctgtgaatgcacacatgcacaccctatatctatgaacacctttgaaagattaggccggtatattctgagattggcgaagccaccatagccaggtttaaattttaagctgaccctatacaagccttcggtccaaaaatcattgatgcacaaaaattaagttgcagggttgcttgcaactcccataatagctactgcattttgtagcacatggtacagtttggcatgtacatttgattctctgcatgtgcacacatgttcacatacatatacaggtactgcatgatagtgaccaaaaatttaggaaaatcaagttgggtgcaaaagaacttaccccacaaactttgtccatgtcaaatggttcgatcaattgattcccgaagacttgaacgatttatatatggaccaatgcgatcgagtaccaagcctgacaactcatccttgcactaattctctacagattttccacgcaagaacaggtgtcctacagcatggacagccggtcagtttagtcatcaatcgagtaagaatttgtgtggcttgttaattcagctaaagttaaattaatttcgacgaaagattcaaaacacgcatactccttaaaccgaccgattcttggcataaacgagtattcagatgattcaaattcatcaccgacgtcattctagttccacggtgatgcaatgcaggcaaaagtttcggccgccgccgccgccacgtgcaatttatcaccggcgtcgaccacgccgccggtcgccaggtcagcgccggaattgatggggatactctatcgccggcggcacgtacggtcgttctagaactagctagaagatcgacgcactctgtactgcccacggatttaattaatgcagcgaacaaataaacgcaaatactcatgatatcacaaaaataagaaattccaaattcgtttgacctatagtattattgttgcatctatgtatacaaattgagtatgcatgtatgcatgcagttaaagcctgcatgcttcttaattcttccccaccacatactcacattaaataaaatgcatgttagttacccctaagagcaagtataataggatgctataagctgactaaatactgaggaggagagagatgagaagcgggctgtaaacttacaatcggcttggacacaataaccaagaaactctgtgtgagagataagtgggccatgtattaattataaagagctactccctctgttccataatataaggcacatctactttttttttatgttccataatataaagcatacatgtatgcatacaattaattaggacctcttcttcattaaattattattttttaaaatcatccgccttcaagatctctaattctattggatgcatgcattatatttattagggtgatccaaactaggagatgataataattgtttcttggtttttgagttaagggtggttgtgccttatattttgaaacggatggagtaactattatatgggtgggctgagagaaggctacaaaaactttacaaccaacaagtcggttgtattattagcctcgttctaaggcccttgtttcttatgcatatgtggagttaaagtctgcatgtttcttgattcttccccactacatactcatatgaaataaaatgcatggtagttaagtctttcttggtcttggtgaaaaaagatatatgatgatcaatatggaatggagggagtagcaaatccaaatttaaatcatagatttagcatgtgtttttgacttgatataaatgctcgtatttatgtttaattattttcagtgttaggtgatgacttgttcatagtgagtctctaatagagatataaatagaatgtacgtgtgtgcattcttagcataagtgtgcatgaatatgtaccgtgttttgaagaaaaaaaagttagaccattgatgaaaattatggggtaattaacgtgtaaattcgccgaccgtttgaatcgggaaagagaaaaataaatggttagtaaatttcagaagatttatataggttttgtgaattcgtgtcaagataaaaaaaaatggcatttcccgttcacctctggtctgtggtcactcactctgacaagtttcagagtcaactgcaaggaagaagaagagggttagctggtttgttgggccttcgaatgaatggtttgcaatgcattgggcctaatgggcctcacgtcgccgccctggcggattagtgggcccattagtaactgtcttgttttctttcttctttttttttcattttggtccttgtttccatcattccatgtctttgatgatgattttacgaccagaaatataggcaatatcgctctagtacatatagggctcatattggaacataagattctcaaaacacatgaacagaaaaagtacaggattgaaataccctaacacattaaattatattccctcattctctaaatgtttgacgctgttgactttttaaaacatgtttgaccgttcatattattcaaaaacttttgtgaaatatataaaactatatgtatacataaaagtatatttaataataaatcaaatgataagaaaagaattaataattacttaaatttttttaataagacgaacaagtcaacggcatcaaacatttagggatggagagagtacatattagaaaaacacagaaaaactatagggagagtcgtttgaattgagcacatgaaaaaacataggaataaaaagcaattttattgcgaagtttatattagaatccctctaaaattcccaagttttgagtcaatccaaagtaatttcataggatttttttatagttattcatatgatccaaatgataacataggaaaaaatttcacaagattgaattcatctaaaattacttcaaaaatcttttgttccaaaggagccaaaaaagcttgttgctgtgttttgcgcattggatgatggcagcatcagcaattaagcatcaaccccctttttcttagctcgtgaccaatttatactctattttcatggcgatttctttggatgcgaccatcttaattttcttgtggacgtaaatagcagccagctgaccatgcatggcccgaattccttggagcctaatcattttggggaaaaccatacagctacaaaagaacgcagagtaatccatgcaaagtgacaacgaatttggagaattttttttctcttcttttccatcaaagttcgttgtcctctcaacatttcttcgcttcctcaagcttgttcctcgcatgcgtgtaaactgagaatttaccaagtttttgttcttctcacgatcgattgataatataatgtaagttcattatcgcctccaatcctcaaattgtcatgctcctatgatgctttttttttgtttgattaaaattgtgttcatattttttatttctccatggcgcatcgtatacgtgcagtgcatgacgcgcatggaggagtcgagttcttgatcgatcgagcgagcgatcggtcaaaacattcggaagaaatcgttgacgaggcaaagcgatccaggagaagccattcgatcggatttgcgagagagatcatgcacaagcgatccaaatcctgcgagccgtccagcgagatggacgagcgccgccgccgcggcggcgtcggcggcaatggcgcgacgacctgcgacgactcggcgtgcggcgccagggcggcggcgtcgtcggcgtcgtcgtcgtcgtcctcggcgacgacgtcgcactgctccagcgtctccgtctaccgcgccaagatcaacggcgccccgcgccacgtgaccgccgtgtggcaccggaccctcatcaaccagtccttcaccatctccatcgacggcggcggcggcggcggcgccggagccggggacgacggggcgctcagccacaaggtggagctgaagccgtggccgttctggagcaagaggggcgccaagacgctcgacgtcgacggcgaccggctcgacatcgtctgggacctccggtcggccaagttcccggcgagcagcccggagcccgccgccggctactacgtggcgctggtgagccgcgacgaggtcgtcctcctcctcggcgacggcaagaaggacgcgttcaagcggaccaggtcccgcccgtcgctcgacgacgccgtgctcgtgtcgcgccgcgagagcgtctccggcaggcgcaccttcgccgcccgcgcgccgctcgccgccggcagaaaggaccacgagatcgtcgtggacagcgccatcgccgggccgagggagccggagatgcggatcacggtggacggcgtcgtgctggtgcacgtcaggagcctgcagtggaagttcaggggcaacgagacggtgatcgtcgaccagtcgccggtgcaggtgctctgggacgtccacgactggatcttcgccggcggcccggcggcgcaggccgtcttcgtcttcaagcccggcgcgccgccgccgggcggggacaggtgcggccgccgcggcggcgccggcgccggcggcatcggcgacgaaggtggctacagcttcttcctccaggcgtggaagacggagtgaggtcatgggcatgagacagggtttaatttgcaggatgtttggatcgatttgtttacatgaaatcaaaaaagcttattcgttttttttgcaagttttgatggaggggaagttttgaatgatccaaatatcgtatagtgtttgaaataaaccaataagcaaactgaacaaaaagcacaccaataaatccaaatggcatgttccatcaacctaactgaacaaaaagcaaactgtatcctcattgtgacacataatcacggttaatatcacaccagaatcaacatatgcgcatgagaaaacaatcccactagttttgggacaactcaatgcaacattgttacaaagtgatgttaattcagatggtgaaatatgatatgcagacaaggtttgaagtattccatgccattgcatttcaataaaaatggtcattactaaattcgagcacaccaaatgttatgtttcatcaacctaacagagctaaaaagaaggcaggtagaacaggctaatatgcaaattaattgtatcttcaaacaactacaaatgctcacagaagtacggttacttccatagcagaatgaactatgcacgtgaggagaaaacaatccggctagttatgggacaattcaatgcaaaattcttacaaagtgatgtataattcagaccagatagtgaaatacattatgaagagttgcagtcttgcagacaaggtttcaagtactctatgcccattgcacttcaaccaaaactgcatgcttgtaagttacaataacagatgcagaacaagttacaggtatcagcataggcaattctgtctacattccattcactcggtcccaatgtcacaataatacatcaggaaagttgtagtggtcgaagaaagtttattcagaccaaatcatggcccatgtttacctgtcacagctgaacatttcctacaaaagtgtagagatactgcgacctctaatgcctgaccatgctaacaaaaattgaagaaaacaaaagggtagtagtgccaaaggagttaatccttcactccatcacagcgacaccgccagctaccttaatcttctctatgattgcctcagcttcctccttcgtgagtgactgcttcagaatgacaggggccttctccactagctccttcgcctccttcagccccaaatctgtgaatgttctaatctccttgatgatcttaattttagcagcagcgtcaaatttctccagcttgacgtcaaagactgttttctctgctttcttctcctctgcctttgcagcaccagcagcaccgccaccaccttgaggactgaaactgaaaccctgtccagaaattgcctgtggtgggggttggttcagtctgagaaggagagccggagcaatctgtttgatctcctcaggagggagggcagcaatgcgatcagcaagatccacaactttctgcgatggaggtgacataggcccgtatggatcatagacttcagggtatttatacttcttagcacctgtgtctttggcagcctctgtgctgtacaaatgagcccaaaccgctgaaagacgacccccagatgttggtcttgaacaacatagtcgtcttgctatggtagagagactcatcctactttcaaccgtgttccttgctagctaaaaaaattccaggggaagaaaagcaataaaagatccttgccctgcacaagaataagaaaaatgaaatgattaaactgaacaccgcacctataaacagcctcttggctcttgcacaaaagaagggttacaagactaacaaactaaaaggcagtagagaagtccaccaccgcaacatagctaccgtgagcgtttatgacttcaagaagttaagtcaatgaaatggaaactgatttgcacatagacttggcctataactcattgctaggtaatgtggatcatttcgcccatgaactaaacatcatttccaattatccacagaagatttgacccctaccgatcctcacatgccgcatgagccgccgcgacgaccatttgaaccaggtgaggagagcaaacacaagttcctatattcgtcggaagcttgatccattgccacaagagcacccaaaaagactctctcatgaatttccacaattatagccgcttaatccatcttcacatcgacttcatttatactcaaacctcctaccgattaatcagtctaaaatatacaaatcccacaatacaaatatacatatccaccaaagatcaaatccttggactatcccccctccccccaacatctactaatccccgacgaacaacgaaaaatctctctccctccgagcgagcagcaaacctccaagatccccaaatattcacgggaaccaactaaactcgttactactactagggttaaggcaagaggcaaagagaaaaagcagcttccagatctaggagagaagctagggctaacgcagattcgagaagaagtgtgggtggagagagatgagaaagaggatgcgcgttatcgggcggatgctcaccagcgagcgagggaggatgcggcggaagcagcagacgacgccgggcaccgctgctccgctcgcggggtggagatcgacgcaggcgaggcggcggcggcggcggcggcgggagagcgaactccggactccgggagtgacgactatctcgcaccggcccagttacaaacaggccactgtgggctttctctgctcgatccttttttttgaaaaaaaaagaagatagaaataacttttctctttttttttaaagaaaggtatcccaaatttgtctgattattttatataattgagtttaaacttgagatttggtgataatgaatttcatgcatgtacctgtctttaataattttattcataaatttgcaaaactttttggttgggtttttacgggtttcacttgtttggtggttttcactggatatatcctctactcagtggcgaagccaccgggggtgccggggtgggcctggcacccccatccctatgcgctgcaaattaaccccccaggtgattagccatctaatccatacaattaactcattagttagttgcaagttgagcctatacataactgaccaatagattttagttttacgtgattacctgagttaattaatgtaactaagcgatgtggttgcaagtctccaaaactaaatcggataaatagaaatgatgtattgtcattcatgtattcaataaattcggtgctatttagttgcctaattttaaaaaatgattcttttatgttatattaatgtgcattcggacatacaccctctatcctaaaataagttcagtttttttacatgaacctagaagaatgtgttgagatatatctaaagtcatatcaacaatcaatttatttacatattagtgcaaaataaccacaaaattcaaaatataattatacgaggtgcaactacacatattaaagcgaacaagaggtgaggtgaggccaatctgccactcagcatgaactgagccatcaagatctacaccattatctaccgagacgctggcgagttcttacatctcatgaccagcacaccctatcactaaatcatggcttcgccactgcctctactcctctatatgataccttatgtacacatacctatctccctcagctcgaaataacgtgaacccagatgtatactgaaagatattttcaaatatggatgcttacatgcatgagaagataggacaatatctcctcgataagaaagactatgcaattcgactcagctttgaagggactacttcgcccatatcctatttaggaattctgagtcctacttatttaagagacgatttttgctacaaataaaaggcttccgaggaggggagcgtatcctatacacacaggctcttgcgtgtacacaccgtgtataccaactaaaaattatcacaaaaaattctaggaaaattcatacatgtactttcaatataattacatctacgtgcaaagtcgtatcttcaaattcattctacatagagaataacaaaaaagataaaattctgacaaaattgcaaccttaaaactgtcagatttttttttgttacgactaaaatataatgaatttgacgttaagattttaaccctaggtataatacaattgaaagtatgtgtatgattttttctagattttttggtgatattttttaagttggtgtgcacgtgtgtacacgtgaggacctgtgtgtataggatatgttgcctccaagaagagaatggcttataatattaagcaatagacatccacaagccaccatcttcacgacgattctacatatagagagagcccacaagtagctgccaactacattgctactgtaacttctaccgagattagttgttaggctagacgagagatcccgcctcatactttatatatactctgtgtgatactagatcccaaacagggtttacatttttggatcgaaatttctgaaatttcaaaaatttcggttctatacaaacccccgatacgatattattttggtcgaaatttttaatttttttatattttttcgtgaatttggtaatattttgtttaaattttattaaaaaaaattatataatttcagcccgaaattccaccaccgataaaaacactaagtccttgttcgtttctgcttgtagcggaggataaaattttagattatcgtgccacatttttaaactgctaaacaatatgttttgtgcgaaaactttctatatgaaagttgttctaaaatatcagatgaatttatttttcaaatttgtaataattaaaactcaattaattccacgttattatcacctcattttacgtgaaacacttaatctttatattcatcttcaggagattcaaacaccacctaaaccgaaagattaaaccattatcccaagcctctctcgccagcgtgcgccgccgctgccaccggctttccgtcgtggttcgccacacgctggcccgcctccatcgcacaagagatggcgcgtcgtcgtgatttgaccccgctgccgccgtgcagggaagggagggcagcgcaagcgagtacaacgtgcgtgactttcttttttttaaaaaataatggattattttatttccgttctacaacagaaagaaaacaattctttcgttttacaacgtgcttgagaatttggaatttggatacgcttggcgagtaagctcgctgctggtttcctctttcatggctaccgaggccatcgtctccggcgtcgtcgccgacatggccggcaggctcgtgtccctcgtcgccggccacctgctggccgaccggaggggcgtcgacgacaagctgcggagggtgcggcgcctggtcgtcaggatcgagagcgcggtggaggcggccgaggcgaggcggatcaccgggcgcgcgctcctcgcgtggctctcggacctcgtcgacggcgcgcaccagggccgctacttcctcgacgcgttccccgtggtggcggaccacgacggcgacggcgacgtcgaggtggcgccgtcgtcgttcaaccccgccaagcggctgcgcgtcgcggcgaggaggctggtgttccgcgacggcggcggtgtggctgcggagctcgacggcgtccttgccgacctagagagtgtctccggcgatctcaccgggtttatcatgatgcttcagagctgcccgccggcgatgcaccggccgctggccacgaacatctacgcggacagccagatgttcggccggcaggtccagaggcgccgcgtcttcgacttcttgctgcaagacggcgacggcgatgacggcggcgagccggcggcggcggagctcggcgtcctctcgatcatcggccgttccggcctcgggaagaccacgctcgtgcagcacgtctgcgacgaccccgccgtgcgccgccgcttctcgcggatcatcctggtggacttccactgcgtgagcctcatggcggccggcgagacgactgctctactgcgctccctgttcgccgccgccgccgccgccgctggcacggggagcactagcatctccggcgtcggcgagaagctgagacttctcgagaagaatctgcgcggcgagaggctgctcatcgtgttcgacaacgtcgacgcgcggaggaggccggcggtcgacgcgatcatgcgggcgctgcggcgcggcggccggcgagggagcaaggtcatcgtgacgagcagcgacgccaggcacgtcgcgggcctcgccaccgcggcggacaccatcaccctccgccccccgccgccagcggagtactggctcttcttcaaggcgcacgcgttcggcggcgcggacgacgccgacgccgaccggcggctggcggcggcggggcaagccatcgccgagaggctccgcctgcgcgcgtcctacttcggcgggaaggcgctgggcgccctcctccggtggcgccccgaccaccggctctggcgcagggtgctgagcagcggcgccgcagacctgccatgcctcggcaccggcgactacatcgccgcggcggccggctgcctgttcccgccgcacctgaacctccacggcgtcaccgtctcccgctcgccgctgagaggtctcgtcggcctccatggctcctccttgatgactcctcctcccaccgactccggccgccgctcgccggagttgcccgtgttgctgtgcaagtcagtcttcccttcctactgcctctactacgccgcgcattgcaccatcgatgatacggaaatcaaacagtaattttcttttttttttctgcacggatactgcaaaaaaaattgtgcactgttcgtggatagtgatctgagttgtagtgatctgaagaaaaccaggcggctgctgcttgttgtcacttgcattgattcagcttgttgatagcgtctcaaatcgtccagtgatttcttttacatatagaaaagtgtaagatgagaagatgagatgatggcaggagaggaggaaatggttttccattcctcctgaggtgttcccaaatttttcattgtcatctacttcctccagtggtggagacaggataaaattatagcaggggctaaaccaaaatgatcgagagcaattaagagatatttagggttatgttaggatttttttttggccttcttagcctttttggccttcttacaaccttaaacaaaatctatattagcccctcatctataaatactccctccatactcataaaggaagtcgtttaggataatgtttaagtcaagccttggaaatataaatcataaataactctcaatttgttgagtttgaaaatataaaaattatatgaatagatttgtcttgaaaaatacttttataaaagtatacatatatcattttttaataaatatttttatagaaacaagatatcaaagttgtgttttggagaccgtgtcgctgtccaaaacgacttcctttataagtatggagggagtatataaattagatttttagagaggtattatgggagctctaatggtctattagggggtagggggtctaaaaccccccgcccacacgctgtctccgccccctgatgggttccaagttatcagtggcaaggaatttgttttgagtgagtatccagacaagaatttgtactattttcagtcctcagtttcgaaattagggtggttgtcatggttctcatgtcacccatagaattgagctagacatgccgattttgttgagtactactagccacgctcagttcaacagcctcatcagttatccataattttaataaaccaaaacaatttattagggaataaaaaataatttataggtaaaatttttatatatgtgtttttagcgatttaaaagttaatattgaaactaacttctgaacaaaatttttaaaattttagctttgaatttaagttattaggacaatggatggagcctcaagagtatcggtgttccacgcatcaggtgtacctaagcgaatacacagagaaaatttttctaccttttcatttggaaagacaaactctcctaggtcctagctcagtggccgtgggacttcctccacgaaaggctgatccatcttttctcctaaagaaactatttattccctcggttagataagatattcgcacgtttgttacatgctacttagatagatgtaacttttttttaaaaaaaagataagatagatcaatatatgatatattatcaaattgacttcttacatgttgtagaaaaaaacaaaatatttatgagcgcatttttattaaatttgttacttttgtgttcaaatctgaaacatatttgtataatgatatactacctccgtttcacgttataagacgttttgactttggtcaaagtcaaattgcttcaagtttgactaagtttgtagagaaaataataatattttcaacccaagacaaatttattatgaaaacatattcaattattgatttaatgaaactaatttgatattataaatataactatatttgtctataaacttagttaaactagaagcagtttgacttttaccaaagtcaaaacgtcttataacggagggagtatcatatatttatcttattagtttatgttaaaaatttttataaatatttactttctccgtttcatattataagactttctagcattgcccatattcatatagatgttaatgaatctatatacatatatgtctaaatccattaatatgtatacaaaggtgagcaatcaggggtggagacagcgtgggggcggggggttctttagaccaaccccctaccccctaatagaccattagagcccccataatatccttctaaaattctaatccatatatttatagatgaggggggaatatagactttgtttaaggttgttagaaggcccaaaaaatcctaacctaaccctaaatctctcttagttgctcttggtcattttggtttagcccccactataattttatcctggctccgccactggaacccataatttaacttttggcttattggttgcatccaaaacttaaactttaaaacttaattataaagctaattttaagaatgtttttatcttagttgattttcagtattgacttttaaatctcttaggacatagatataatttttttacgaatatgttattttcgtttgcttcactctttttctcacggtttattagccgtcgagtaaatgatgagccgttggctatccgggactggcccaatcttttaccgaccattttcatctgatagatgggctttgttttgtctcattagccggctgtgaagatagggctttgccacggcccaaactgcgatcgcaatcaaatgaaatggaaaaatgaccaaattaatttgcaaaggaggtacatgttgcagcattctccttagttcaaatcgagtgaagaaaataacaatatgcagagaatgaataggttttgcaagaatcagctttagatcctcctacacgcactcaaaaccatgcagagatggaaagagttgatgtttactatggtattgtgcatctgtgactaaagtggtaggatcagcatgcagagtttctgcttgtatgctgtaattcattcagcaatataattccggccttcattgtgatgatgacgtttttgtgacctcgaatcgtccgtgacaactcaaacaagactaatactccctccgttcatcatattttagcttgacactaaaaccgaaaacaataaacgcgcttataatcctactcctatgcgcttatcagccaacagaccatgcatgcctcagcccacgcttcggcttcgcgtatttaacagcgcacgcagcaacccttcggctttgcccgcaaaacgcttcggctccgcatagcagcgctcgcaatcagatcaggcgcctttttttttttttgccgcgacttttttcgctcgctgaaaatgaaaatcagaaattgaacttcacaggttcagtggccctatataagcagcgatgtggtgatgggatgcaccaatgagtttagttttcaaatcttctcctccctgcctctaccacacacaaagctgtagatgatcttgagcctcccatagattaggatgccattggcgagtgggttgggcttgctcatgaacctgagtatgacatggtgtgtgccgatgcagataaatgtactgatctatgtgtctttgtttttggtttaggaatcgcatggttctcgcttcatctgtaacactggtggagaagtgccttttactaccggttcataaccctttatagctccggttttccaaccgggactatgaatctgggactaaagatcccgggtgaaataaccgggagtaaaaatccatttttagtcacggttggtgtcatcaaccgggactaaaaatagaacatttttagtcccggttggtaacaagatagagctaggctagctagatccggttgctctattattctattcttttcttcattgtttttaatatattgatttcactccatccccatcccaaaatcccaaatcaatcatccccaaatcctcaaatcgatcatatccaaatacatcacaaaatcttaaaaaaaattacaccacaacttttacaaaattcatcacaaatacatcacatattcatatcacacacaaatcaaatacatctcagatccgaatcacaaattctcaaaaaaaaaaacaaagaaacgcccgctgccgctgtgcgctgcccgccgcgaggccgcccggccctccgcccgccggagcaccgatcgccgccgcgagtccgaccggccctctgcccgccggcgcgccgccgcaaggccaccggccgcccggccctccgcgctgcccggcctccgcgctgcagattaagaagtggggaggatgggagggaaaggaggagaggcgccgccgggcctctgcgctgcagatcaagaagtggtgaggattggagagggaaaggaggagaggaagagataaggtgtaaggagctagttagaggataggagaagccgggagttaaaggggagagaaaggaggagaggaagagataaggtgtaaagagctagaggataggaggagccggggagttaaaggggagaggagcgggagggaggaggagacctcgatcctatccgcgtgcacacctccccgtgcatgtcgatcttttttttctcggttggtgttactaaccgggattacaaatagatctttagtccaaccgggagtaaagagtatgtcgatcttttttcccggttggtgttaccaaccgggactataaatagatctttggtcccggttggtaagatcaaaaagtacctctgagcttttaaaccgggactaaatatatttttagtcctggtttttaatataaccgggactattgtgaaatctggctgaccgaccaaagatggtttctccaccagtgtagtgtcgtagttctggtttgaattagttacaaaattcgtttgtgatctcttattatttgtgctatcgtaggtgttgatgctgccggaggcgaaggagctgttgccgctggagatggaggtacttccgcccaagttggaggatatgctggagagcagggtgataatattgctgctggagattcttaatctacacaaggatctgctgctggagaggaaggtaaacttcttctattaatagacgtgttgtatactaatggacattgatgtatactcagtaattagatgatgcaaatgaacacgattgaatttaatctttgtcatgtgatgcatttcgcggatagcttttgtttttagattctgcttttttgcctagcactctacattaatgatctgttcagcgattatagttcaatgagtatagttttatcattgcaaaacatcctgtctgcaaaaatctgaaaatagtacctatagattcactatttatatcgattgcatctgttttcagaatgacagcatttttcaagcatattgtgtagaaaatatgctcgagattgctcaataaacgcgtccacgtccacgactacctcgtatgcagccacaacggaatcaagcttgctctcaagtacagtaactgcggcaccatcgagttccatctcgaccacatccacggcggcatcaagctcgctctcggcgacagtaactgtggcaccatcgagctccatctcggccacagccatggcagcatccaactcactctcggtgacagcaactgcggcaccattgggctccattttgggcacagccacaaccatcgccatcgcttcatcacgtacggccaggacgatgcggacctcactctcggtcacatcaactgcagcgccatggaactccatctcagccacggccatagcttcctcacgtacggtaacgacggcatcgacctcgctcccggccacatcaacagcaacgtcttggagcttgctctccatcaacccatagaggtcgagctcggtcacagccaccgcttggatgtccacgacgacttgggtatcagaaacttccgtgtcgctggcaaaggagtcctccacgacataggccgaagcctgggccaaggcatgcttggcccattggcatgctagttcacacacacctacaacccctgctcgggattccaacttaaaatgctaacacaaacacatcaataagaacaagtaataatatagtcaactactagctttaaaaattaaaatatcatatatagcatactacataatagtctactcatacatcaattaattgtaaatatatattatatcattaatttctaatccacccatctcacatataactagccagcactccgcgtgttgctgcggtgattatattcaacgtgtttaaaacatattccctccgtattttaatgtataacgccgttgacatttcgaacaacgtttgaccattcgtcttattcaaattttttgtgcaaatataaaaatatttatgccatacttaaagaatatttgatgataaatcaagtgataataaaataaatgataattacataacttttttgaataaaatgaatggtcaaacgttgataaaaaaatcaatggcgtcatacattaaaatacgaagggagtagtaatttaatgtgaaaccattttttttgggcatagtagtttgaaaaaaaaagaaaatatgtgctttatatacgaaaaaatttgcttctttttcactctctttgatatatgtgttcttatgataatcgatatagggcatgagcttgtcatatgaaaagcagctaaacgtttcccctttggagacacataatttaagatatttttatcacacaaataaaaagtgaatggttctgtaattattcattagttaaaaattatattatagtagtacatatgtaaggtgaacatgtagtattactgtaatagtgaaaatatactcgttttgtcacactcttcacgtagaacatggtaaaatagctatatcacatttatttcattgggtttgtggaatataattgtcgacgtttgatgtcgcgattccagtatttgcatagtatggggatcgttggtaccagggtatatgcgagattgaggtaaaagagatgaaggcgaggaattttatacaggttcgggcccctgaattatcaggtaataaccctacatcctgttggccgaagccggtattgctcttattcatcataatcacaccagtacaatatttggggtagcctatctaactgttgtcgacatgccggtctgaaggtctgactcataatggataacagggtagtctttctcctcgagtccgtacccggcgagatcagagatagcgctttcatctctcctgacagtatccggagacactgtaggggactaagtcaatatccgatgtcttatcttggcgtatgttggtttgtatgttgtgactttgtggcgtctatattgtccgtggtgggtgtgtcccatggtgggtgtgtcccctctcttcctagggggtcttgtatttatacccataggtatcccgttgtccaagtagaactaaggaaaccaatatggatacaatccgagtagtccttgtcgtttccatgtagaactctgtttgtctttccttatgcagaactcctcctatattcgaaggttgtttccgtataggatatggtatgtggtggatcctgtcgagatttagtcaactactattaggtatgtggtatccataaccctgacaataaccatataaagttgttagcctataagcaaagaatattattatgtaattaacaaaatgaaatgggttcttttgcaaaacttgttggtaaaaagttaatgggctgtatcaggcctctgacactcggtaccatggacggttgtgtttactactgtagtttatacaggatggaagagaggatgctgcggttacgtggcagcaggagccatggctgccgtacttcaccgagaataaagattttataggatttattggggtccatgttgcagttactacatatttgtaggctattttcttttctctcctctctctctcttttatataaatacaaatgtgatatgacaatttgtataatccatttctatcatcttaggccctgtttagttaccccacaaaaattttacacattgtcacatcgaatgtttgaacacctatattaaatattaaatatagactaaaaaaactaactgcacagattgcggctaatttgcgagacgaatttttagcctaattgctccataatttaacaatgtggtgctacagtaaacatttgctaatgatagattaattaggcttaataaattcgtctcgcggtttactgacggattctgtaattatttttttattagtacccgaacaccccatgcgacactctatataatacccaatgtgacacgccaaaaatttacacccctaaatataaacaccctcttacttgtattggcgctgagcattctccaggactgacagcaaaagagtctgacatctaaacacacggcaaaagaaaacaacactttttaagttttaactccataaaactagacatcggaaagcccatccaccggtcgccatcctcctctatttgcaacccttttccatttctgcgtaaccatcgtcgttttgcataacacctgaaagggtgattttataatgattatgttgttgacaacataatcatttctaataagccacaacgaccagccaaagtgctgacatgtttcctccgttctctcttacttgacacggttgacaagcttgattttatctttgaccaataaaaagtactccctctctattttaaagtatagggtatattttattttgttagaacaagacttagaccaataattactctattacactataatttttttaaaagatattgatgttgttagatttgccttaaaaatatgaatttcttccatataattatacttttgtgacataaataatatattagagaagcaattgttaatcaaaatcttattctaataaaataaaatacaccctatattttaaaatagagagtactaccttcatttttaaaatatatatcgatattgattttttaaccatttgtcttatttaaatttaaatcatacttaaagaatcttaaataataaatcaattaaaaaaatgacaattacataaatttttaaagagtaaattacactcatggtacatgaacgtgtgaggtaggtgtaaataaggtaaaacaatttacaaattgctcatcccggtataataacgtgcctagcgaacctagtccaaaacaatctacacattcaaaaatgattgaatatatagtaccagaatgacacacatggcgacgtacccgtcgatagcgagacgcccgtggtgacttcatcagtcccaagatatatcggcccagtcttctagaggtgctcataggggtaaggtgtgcgtgtgtgcattcataggagggaatgtatgcgcgttgtgagtgtctacgtttgtactatgtttcttaaaaaaaagaatgacacacatgcatgctagtagttatttgtacttgtgctttgtagaacatagtagtcaacaataataattatgttgcaatctcttgttggctgcttgccctaccgtagtacggattttatttttcagaataaaataagtatgcttgcaaaggtttcatcaagactgatcaatttttcttgcgtgaattgttttggcctggttcgcatgaactagccaagttattgcaaagaacacgagcaatttacatgttggtgtatctatttgtacacaccacgcaaagttcatgtacaacatagtttactcatttaaaatgagatgaatagacaagcatataacaaaaagttaatgccatcgtatattaaaaaaatgaaggagctatgcaactttttttttcaatatttaactttttttgcaaaaatacgagcgttcaaagtttatatatacataatatactccataataaaaactatccaacatcaaataaaaataaacagaaagagagagtaatgcaaaaattcctgtgtccccctcggcccctccatggaaagagacatgatgcaaatcctaccctaattttaaagtttgacttaaaatatgttcaaaatggtatgtatccaaataagtgggatataataatcatataatgggtgcttagtctaatcccgtctgactttgcaccagatttgagccgttgagctcgtttccaccaccttcgaattcccacatggccagcgacgccatcgtctccggcgtcgtcgccgacatggtcggcaggctcatgtccctcgtcgccggccagctgcgcgaccggcggggcgacgccgaggagaagctgcgcaggctgcggcgcctcgtcgtcaggatcgagagcgcggtggaggccgccgaggcgaggcggatcaccggccgcgcgctcctcgcgtggctctccgagctcgtcgacggcgcgctccagggccgctacttcctcgacgcgttccccgtggcgacggatcacgacggcggcgggcgcggcgaggcggcggtggcgaacccgctcaacccggccaagcggctgcgcgtcgcggcgaggaggctggtgttctgggacggcggcgcggctgcggagctcgacggcgtccttgccgacctggagagcgtctccggcgatctcaccgggttcatcacgatgctgcagagctgcccgccggcactgcaccggccgctgaacacgaacatctacgccgacaaccagatgtttggccggcaggtcgagaggcgccgcgtcttcgacttcttgctgcatgacagcgacggcgatggcggcggcgagccggcgggggcagagctcgccgtcctctccatagttggccgccaaggcctcgggaagacgacgctcgtgcagcacgtctgcaacgacctcgaggtgcgccgccgcttctcgctgatcattgagctggacttccattgcttgagcctcatggcggccggcgagacggcgctgctcctgcgctccatgttcgccggcaccggcggcgcggcgagcgccaccaccaccagcgtgttcggcgacagcggcgagacgctggcactcctcgagcggaggctgcgcggggtgaggttcctcgccgtgttcgacagcgtcgacgcgcggaggcggcgggtgatcgacgcgatcatgccgacgctgcggcgcggccggcgagggagcaaggtcatcgtgacgagcaggcacgccgagcacgtcgcgggcctcgccgccgccgccgcggacaccatcaccctccgccccccgccgccggcggagtactggctcttcttcaaggcgcacgcgttcggcggcgcggacgctgaggccgacccgcggctggtggcggcggggcaggccatcgccaagcggctgcgcctcgccgcctccttcttcggcggcaagatgctcgccgcgctgctgcggtcgcgccccgacccgcgcttctggcgcaccgtgctgagcagcggcgccgccgacctgccgtgcctcggctacgccgacgacgccgtcgccggccgcctgttcccgccgcacgtcaccttgcagagcgtcaccatgtcgcgctcgccggagagaggcatcgtcagtctccaggactcctgtttggttactcctccggcgactcagtccggcgatcactgccgccgccgccgctcgccggagttgcccgtgttgctgtgcaagtcagtcttcccttcctactgcatctactacaccgctcattgcacgatcagtgacagtgacactgacaacaaacaatgaattattccagtgttctaaacagattattcaccggattagtgacgcggattatctacttgattattaacaaattaactattatattgtagagtacaaacctaacaaatagaataggttagaacaaagtggtaatgcagtagaagcaatttgtttttgatagatcacatttttagaagcatagaacagataatccgcggaaataatccggtgaataactagggaaaaaaacagggcctcaatttttttttgcacgaatagtaccaaaaaatggatgattgcgccgttcgtcgtacaaatttgactcaggaatggatggtgatctgaagaagactggctagaagctgttcattgtctctttcattgattcaacttgctgctagttgcgtttcaaatcagcaagtgatcactgtatcttatacatatgaaacagtacagttttctgagtttattctgaaagagaaatgcatattctttgaagagtgaacactataggatgtgatgattagataatggcagaaaaattcagggtcagaggaccttgagcagctgaacctcaaacaccagaggctccttggcatgtgacaggaggcttcgccgtggaccgaactgcgatcgcaatcaaattaagtgcaaatatgatcaaaatcacagacaaggaatatgttgaaacaatcagcttagttcaaatcaagtggaaaaacgacagaaaaaaatgcacaggatgaatatgttgcagcaatcagcttagctcatcaggtagttttgtaacttgtacctcttctggtatgggctgcaagctctcatcagtgtaacctacttgaggaggtatcagagctctcctcttacctacactcaagccatgaacagatggaaaacgttaatgtgcttaaaaaccatggtattttcagagatgaaaaacattgttcttaaagtgattagcatgcagagtttcagtatgctgtaattcagcaatctaattacctcctgtcttcattccaacgatgacgtctttgagacctcgaatcatctgtaaatgacttaaaacaagactattaaaccagatatcagaataactcaaaactgttgaaaaatgtgaggatatctgaatgatgcgaagttttcaggagcggagctaattaataacctcttttccatcaagtgcaagtgtgaccggcttactctcgccgctaaactggtcaaccgtgctggatcacagagtgcagctaatgagatcaaagaaatgaatggacatggacagattgtactgacactgataatccgtacatgacatgaggtctcttgagctgaatttgtacccagtgtcatctttcctcacctatgcacgaaataaccatttgcgcggcggcacacatagttgaattgcacgacatctccttcacgtgcttctggaccctcgccatccacaacatcttgatcaaatatggagaaacatgagttctttcatgagcagacagatataaaaaaacgggacattcaattatttgatagtcttaagatgtgccaattaatgatttgccactcgctgtctatgacatgtaggatctcatgtatctatgacatgtgggtccaatggcaaatcctttagaaccactggtaacagtaattgcaatgtatgtatattttaccttcaagcttcactccactgtccagctttctgtacctgaagacttcagaagggaaatcaaatcagatcggattcagtgaccatcgaaattcgaaaattccatctcaataaaagatctcatcaacaccaaccagatgagcatgatcacctgatcacatcaggctccagcgtggcggcacgggcaggcatgtgggcgaagaagagatcgacgcagcaggaggccgcggccgcggcggcgccgccaagaatcgccatctccgacaccgccctcctcctggaaaccaccccgcacgccgccgccctcgccggcggagatctccccggccggcgccggcatctgatcgagagcgcgcccaagaacagcaagcaaactcagaccccgagaaaagaacacatccaggagaacttctccgcgtgccgcatttaccttggagatggagaggcgcacggcaacgggttggtcaatctcgtcagcgacgcgggcgccattgtcgtggattggaggaagcgaagcctggatggtgtgcctgtgaggtggaggtggacagcgggagggagagggcggcttatccaacgaaggcgcactgaaagattctgattatagatctaaataaacgcactgacaccaaaagttgagatggccgagttggtctaaggcgccagattaaggttctggtccgaaagggcgtggattcaaatcccactctcaacactcattttttattttattttttaaaaatcgaatctaacttcttgaaaaggactttagttttttattttattttttaaaaatcgaatcttttttaattcgaatctaacttcgaagtgtaatttagataaaaactgacttggtataacactccttttttagttttttttttaaaaaaaatcgaatctaacttcttgaagtgtacttttgaggggatgaggggaagataaaacttaagtcaaaagttactccttggagtggagtttagctaaaactgacttggagtgttcattattcattttttattttactaaaaaaaatgcccgtgcgttgcaacaggtgaagtctattttaatcttattattgttatatgatttagtttagataaaattcactctgggagttcgcttggatatatatttttttagaaaatcatgaactgcagttaggagtccgatcattccaagttaacatgcgagtttttttaaatagatttattatatgattccttcattattaccaaaagtgaacgattttaaaaaccgactcaaatacggatatgtattttcaaaagaaaacgaatttaaaaaccgactcatacacggatgacgtaccaaaatacaggcaaaaacatttttaattttcataatagtattttatttaaatcaaaacacacttcatggagtggatttttttttgaaaactaacgtaccaaaataccggcaaaattatctttaattttcataatagtattttatttaaatcaaaatacacttcacggggtggatttttttttttagaaaactcacttggtgtgttcatcatgttggatctggcttggagtgtgcattattctactttttttttattttttaaaaatcaaaacttacttcttcgtgtggattttcgataaagtgacttggaatgttcattatgataaaagtgggatgttaaaaaaataaagaagagagattctttcttactcctacaaagagttcagattggggaatcctgtaaaaattttgtaaaaacaattttcatgctatatgatgcgttcgaccctatatgcgatggccaccaatacatataaatgttagtctagagtgaaagtagaaaaccattacgacctctctaatgacgaaaaccctaaactcacaacttcataacatctgccggaatgataacctttcagaacagtaaataacgaatctagtttggcaatattttgcatggttatttcaaatatccacaactctacatcctaaaagtacaagctatatcgtgtcattacatgtcgaactttgggtttctcgacttacagtgaaattatgggcaaaatacctaacaaaacattttaccaaaatcgttgcttactatagcccttcgcataaaacaaaaacatagccctaaaacagactctaaccggttgatcttcgtggttatcattcttatcgagtcggttcatatttagaaatcgctcgatgaacctgtcaatatctctactattaaaaaaataaagttatttttaccgatactttggtacgtcatccatatggattttttacatatcagtatttgagtcagcttttaagatcgttagcttttgaaaatataaaaggagtcatataagaaatctactcctaactgcaactcatgattatatatatatatatccaagcgaattcacacggtaaatttcaccttaacagataacaataataagattaaaatagtctttacccgttgtaatatacgagctttttttagttcttttaaaaaaatcaaaccaagatttaaacttttagcaaaaaaattgtccaaattttaaaagtttgatctgtaactaaatggtagccgcatttattgaggaaatcactcggaagcaaataggtcacatttattaaccttacttccaactcataattaggcccaaggcccaaccataccctacctaaaggcgacctctatatgaagaaggcaaagctaggttggtcaaggcactctctcccctaatccccatctcatgagctcgtcgccgccgccgcacgccctttggtagcggaggagcgcatggcaatcgtggcgctctagccgacacaactaacgtcttctcgggtctagtccaccggatcatgcctcctcgctgaggtttccctcccactactccaggttcgccaccgccaactgatcttatatctaccctagttatcgtctcatcgcaccggtgatttgtttaattacctattattaatgtataactatcgttatcctcgtagcctagtgttggatctaaaatgattctactaagggagcacctccgatcgaggtgttcagatctattcaaaaggggaagaatacatggataaaaatttattttatatcttttcctttcccaaaatataagagtgttgattatatgagacacatatagtaggatctggataagctctatgtccaaattcgtaagatcagactccatgtttatctaaccaaaatctcttatattttgggagatatgggtacttcattataatagtaaacgaaaggaactgttattataatttctgaaactttaatgatactttcaatgatattactaaaatataccataaatgagaatccagtagagtaaaccatggtagtgagcaatttcctttttttttaacctgctttttctctctctcattcagctatcggtctccatttggatcaaattattatagggaccacctatacatttgtcgaaaaattttctcctaaaaatttgacagatgtaattatagtacaatcgtagtgtaattacactgtaacttatatataattacattgtaacttgcatgtaactacagtgtaacttgcatataagtttcacgtaattttgaatcgttaaatctattacaagatttgttttggtgaggaagaaaaaaaaatcacagcacaaacatatgtgtaagaatttgttcccacaacctccattttaccgaaataacatattacaaagagatttttgaaagttacatacaagttacactatagttacagtgtaattacatgaaagttacagtgtaattacactacgattgtactgtaattacatctgtcaaatttttaggagaaaatttgtcgacaaatatatagcaaaatcgattattatactaatcccaatattatgctttattatttgctttgtttcagccggaggagattagccgatcgtctatctcgagaaaagcccattacacttcggcccgcgagccatttcgccgccggccgccggccgccgcgacgcctcggctccccggagttcgcccgccgccgccgcgtcgaccgcggcgatctccaccccgcgacgccggcgtctgctgctcccgccgcatccccccgcttcgctcgctggtgactcgtgagcatcccatccgatccgcacatcctcctcctccatttctatctctatccgcactttttttttatctcgaattcgcgttagccctaagctttttctgtgctagatctggagggtttttttttaatctctatggcttttgcgttaaaccctagtactaattggagtttagtttgtttccgagagaattaacccccatatgcccccaggatagaatccgtcgagatgcggtgatgtttggctaagtttgactctgtgatttgcttgcaaagcattaggatgaatcattggattggtgttgaatttgttgggggtatttccgtatgaatgtatgatttgtatattagaatgtggttttggaagtcatcatgcaacatttttctttggatggatgtctcctttagaatggattcactactggaaatgatctttataattgtcgcttgaagcaggaaaagatatgaatatatgatcacacttttacaatgtagaatgttacatgaatggaaggtttatcagggttacctagactgctggttaaatctgcagttgaggacaaatttggatatggtgtctgtttctaccaagttgcaggaggaacatgcaaatgcaatgttttgtctcatcttcctatgaagcagataacactattgtttagtactctctccattttcttatgatgcatgtggtttttccaacctagttaaagacataaggtttgaatgtgcatttattgactcatttccctatttaccctcactctctggcttgcatttataggaagcatctcaactcctattttgaaggtgttttaagaataggcagcatggtcattttaccttctctttcccttggtttatactctgcttgatctgtatgccatctcaaaaatatattcatatagtcttagaaagggaaacggaaggagtactttagttcatgtcctatttcctaagcttaattgttatttcagaaaaccaatgcagttaggattgtttggttgttattagaacatgtatattatatatctataccattctgttttacctatgcttcatttgtggtccatgcgtatcatcaagtccattttgaatgaccttgtagatcatcaacaatgccttgtattttcactccaaatgtactgataagtgatctagtgggcaaatattgtaatttttttgttagtcatgtcctaaataatatcttctttcttgttttttaccccagtacagtccagatccagatccaaccactttacctttttgttcttccaattttgtgctgactaagccttttaccttggttgcagttgtcacttgccatcaagccatggaagacaataatgatgaaattcttgatgggcaaaatgaagaagtgcaatcccaagtttctcttcctcaagatattcagcggattattattggtttcctacccggtaggactgttctcaagttctgcagtgtgtgcaagttctggagagactgcattgtagaacctgcttttgtggatcaccacctcaactgtgctctccgcttccgccaggccattgcctgcttcacctcagttgataacggtcttgtccagatgtacatgtttgatcccatcacagtgaacttcaaaagaacagagcctgtgttctcatctaggtttcacatgtcacaaccctgcaacggcatggtgtgcgcctatgatttaaaaggtgctgctgaagttttgaatccaacaacaaggaagcatttgacgctgccagcttcagaaagtgtatatcaggctcaatattcggaatattttcttggatatgtgcactctacaaaagagtataaggtagtcgctctccgccattggataaagcacttgacatttgaagtctgcactattggcacgttgtcatggaggacggtacgtggatctgaagaggaagaactcctgaagacaacaaagccggttgttgttaatgatgaaatgcattggctacttcttgatgatgaatcatctcactttactcgaaaaatcctctcattcaacttgacagatgagaagttttcatatcttgatgtcccagacagtgtaagagaccgtgatttggaattagtcgagggggaagggaaacttcatttatggtctatgccttgtaaaggggcagcatatacagaatcagagatttggctggcagactcaacccggcaattctgggttcacttgcacaatattgcccatccctctgttttgggcacgaagccatttttcatgtacaagagcaagctctttctggggagccaaaagagattcatctatattgatattttggatgggacggtttgctacgttgatattccttctggtgaaaatatcatatcttctggcatgtttgtggagagctttgtacctgctttgacaggcacaggcttggtgaactcaatgacattattaaccggttctcgttatgctgggtcatcatcaagaggctctggaccatcttctcgtgctgctggatcttcctcaacaagaactcgacgttcacccgctgcctccaggtggtcctcagcagttgtgcaatcctccaagcgggcgaagagaacaataaacttagtgtggaagatgtatacagaaggcacaagcaagattcagcaggggctatgaaataatctctttggactgtgcagcagcttgaagctacctacctacattccagcaaaagctattggtctttgtatatgcctatggcagagaagaagcagctattagcagtttatgagtaatgcctatcttggagagaaaaaggtacaccatggaagtggtttggtaatttggacagaagataaagatcagaaaagatacagtgatatgttaatgtgtatttcacatatgttttgctttgcttaagcccctgcctatgggggcctttataccagaaaatggaaagctatatgaaataaacctgtatgattaaggtactcttgttttgatttgtagttgtaaactgtatgcctccattgcacctggagcatcagttaatcagtatatgtggcaggaaaagataaatacaaacatccttttgtttttggaaactatatccatacaaactgttgtttaaatacatatcagatacaaactgtacatgatgcttgtggttaattttggtgtaatttgtttccttcaactatattagtatatatgagaactgatccttccatttatgagatatatatatatatatatatatatatatatatatatatatatatatatatatatagacacacacacacacacagagaatgtttgggattttgttgttcagacggttggcaaggacagcaatggcgggaagccgaagtatgcccaggcgatgtcgccggcggcgcaccgcgcgcggcagatcatctccagctcgaagctcttgacgtcgatcctgtacagctcgacgtccctgctccggtagctcgtcatgaacgccggcgtgccatggctgacctcgaggatcaggctcccgttggcggcggcgcggatgctgtacggccggccgtgcgccgccggccacggcaacggcaccgtccgctccagccgccaccgcgggccatcgccgccgtcgacgatggtgtagtagtagaggcacgcctcgccgccggcgcggtagaagtcgtgcgcgaacacgccgaccttgccgtcttctccctcgacgacggcgacgtgctcctcccagtagcacgccggggacgggatctgcttgacggtgatctccatggcgcgcgtgtcgagcaccagccaccggtgggtgaggcagtcgagccagtagaagcagccgtgcgcgtagaaccgccggttccacacggcgtgcaccgggcagccgaacggcgagcggtgcctgctccacacgaagcactccggcgacgggagcgcgcgccaccgcccgtcgcgcgacgcgaaggcgaacgccaccaccttcctcgggcaacgcgccgtccatatcacggcgaacgcgggctctgactcggcgtcggcgtcggcgtcggcgtcgcacggcgcgaggaagggctcgcaccggcggcggccgccgatgacgccgagcggcctgtcgacggcggcggcgagctcgcgcgggatgggcgggaggacgacgtagcggcgggagagggggtcgcacacggcgagctccgggaacacgttgtcgtcgagggaggcgacgcggtcgaggaggaagcggccgtcgcggtggtcgcggacgatccacccgaggcccctgcgcgggtcgtcgtcgcccaccaccggcgacggcgggaggaacgcgaaggagaagtccgcggcggccgcgacggcgcgcgccgcggcggcggacgcgtgggggggctcggcggggtggaaggcgccgccctcggaggagaacgcgaaggagcccaggagcgcgccggggcacggcccgtggcgcgcgcggtggcgccggaggaagcgcggcgacgacacgagcgcgcggaacgcggagcacgccgcggcggcgcgcgccagggaggagcgggaggggaggcggaccaggatttcgtccaccacgtcgtcggggacctgcgtctcgccggcggcgacgatgacggcgacggcgccggccatggcaacagctgcgcgcgcggctgacactcagagcgaggaggggtgggggcgcgctcgaaatattttattagagtaaattgttccggcggtcattaaacttgtaggagtgtgttatctaggtacataaattctcaaaatgcatatccaaatcttagaacttatcatgatatgtcatctaggtcccaaatcctcaaaatacatatccaaatcttagaacttatcatgatatgtcatttaggtcctaaatcaccacaactctttcagaattctacgtggcgttgatgtggcatgccacacagacatgacatgacatggtattattttttctttttcttttttctcttttttttcctatttcttctcctttctctgtgacccgtgtagaaaaaaggaaaaaaagaagaatgagaagaaaccgaaaaagaaaaagaaaagaagaaaaaaaagaaaaggacacgtcacgtccatatggcattgtcacatcagcaccacataggattctagaggggatatgtcaatacgtaggattctagaggggatgtgtcaatttgggacctagatgatatactttgacaagttatgagatctggatatacgttttaagagtctatagacatatgacacaatcctataagcttaaggatcgccaatacactttactcattttattatcacttctctctttttttttttggcgcggcagctgtcgttgtcgtgtgagactgacctgtgggcccagcaatagcctcacacgtgaaaaaaaaatgaaaatcggaatcaattgtgagcgaggaccacatcatgccgtgcgtttgtatttcagccatggattcaaggactgaattaatgcttttgtttaggccctgtttagatcgcgtcttaaattttttcactcctattaaatataggctaaaaaataactaaatgcacagattacgactaatttacgagacatatcttttaatcctaattgctccatgatttgataatgtggtcctgaagtaaatatttgctaacgaggaattaattaggcttaataaattcatctcgcggtttactgacagattctataattagtttttttattagtgcccgaacaccctatgtaacatcctatataatacctgatgtggcacatcaaaattttacacccctgaatctaaacaatccttagttggcagataatcatcagtacttctaaagctggcagtgaaactaacagacaattgatacaagtggcacagttaagctttgagataaagctagaaattatataagcaaaaaaaatcctgaaaaacaaagttttgagcaccacatctagcaaatgctagaagcttcccatctggcatagtagtacatggtatcttctacctaggatttgtagaactgaatggagtgatcaagcggaaaaaaaatccagaaaaaaatacatatgaaaaatattatgatttctaaaattttaaaataaattagataatgtctattaaagtcctctgaaatttatgtgttataaattaactctaaataaataggacgaacaatgcatgcaccaatagaaaagggaaaaaatgtacgattataatcacataccctttatttcatcaattatgtttaaaataataataaatttattgaggaaaagtcttgcattcgaacactttgtctcaaaaccaggtcacacatttaaataatatataaatccatcgattatttagttcgttggtctattgatttataacgaatgatttatctccctttgatgaaatatcaaaattctttactaaaatatcattttctgacatcaatcaataaactcacaatagtctttcttggactatgaaaaaactaaaattcaattaaacaacatacactataaatataggcgcgctgattttctagtaatacctataacgtaatgatatatatgacacttacaaaactttagcatgtgaagatttttatcgagtgatttggtttgctactttatcgaaatttttgcattagccattttgataaagcgacatcaaaattgaattagcttattgttgagattttaggtggtaggtgaaacagtataaatcattggggtataattaatcgagtattaattattaagtctctttattttctaataaatgtgaccattaaattgtgatataacgtgtgaccgttcttttttacttaaaaaattgtgtaaatattatttattttgctgtgacatgttttatcattaaataaattcgaaatatgacttatactttagcatatttacattttttctaaataaaacaaatggtcaaacgttattctatgagttaacgcgttatctatttataaaacggatgtagtataaacttaaagaaaaaaactatataggaagtatttgcacaatatgtgccgtctagaatatgcgtcgtctagcatatatatttaatgtctttggctccaatatattttttattacatgataggcatatacacacaacactaaaccacatatatataacaccgatgacatatgatactcatagattatatcaagagtgaaaacaataatgttaattcctggatgaccgatgttagtttccgactttttatcgactgtgccatatgaaaatggtagagcatatacacatatacatatatgtgtgtatgtgtgtgtgagtgacaaataaacttactctctcactagatccagttttacaggtcacatgagaagcggagagggacagagattgcttcaataacataaaaaaaagggatgggaagagatgaacgccccgcccaatttttttaggaaagaggattcaaacatatgttactgctccctccgtcctaaaatataagcactttagcatagtgacaagtcaaatatttttaactttgactattagtagcaaaaaaaatttataatgtaaaattgatgttactagatttattattaaacaaacaatcataatatgcaactatatttatttaaaacatcatatttttacacatattgttggtcaaagtagcatctcaaaaaccgtgtcagggttaaaaaaaatacttatattttagatggagggagtagctagtatgcttcaatggcatcaagacatctatatactcattccgccaaaatatataataatcttaacctaatatatttatttagattattaggttatgttaaatttggtacggggttactatatattttaagatgaaggtattaagcgacagagatcacagcaagttgcatgaggttaggaaaaaattattcgtggtatcattttctttcgctgtcgaacatctcgtgttcacgaggacgacgcgtttggtaagcaccacatgcaagtagactcacggcacaacacgaccaatggagttcattatcttcatgaaaaaataaacatttataacttgtccgaatgctagatacgcgtcagaggtagaaaaggccatcgaattttgcgaaactaaaccggtagaagagctgctgattatatttttataagcagattaaaaacccagataagttttaaaaaaagaaaaaacaactaaacgagaaaaatctcgccaagctcctcaatactaccgttgccggctagataaatttacagcacacacaacaattcaacactacaacacacttatagtagatcatcgacggaacccaaacatgagtggttgttaccaagcttgcgcaaaagcgacacatcaactccaactttcacagtgaatgcatgacatcgttgccaagcttgcgagagcaaagcatatccgactttaccacaaacttgtgtcgtcgttgacgagctcatcacaaaaactaccaagcagctgcgacttcccatgacggacatcaaccaaagccaccgtatcgtcgcttcctgcttatggttggtacctatacacctagaaagcgactgcaacgtgttatcgttgccaagctacattgcaccccaacaacaaagcagctctgactccccctagcaaaatcaactaagagcatcggccgcctactgcaaagcaagaaacgaatccaagaaggcgaaggcctcgccgaacatcccggcctattgagtgttggtgtggaagcagaaagcccgcagctaacgtcgatttgacgatcagacatatacatgaaaaggttctccaaaactacacccttaacagaaaaacgacatgaatctctgttgtcgctcgcccggtaactgtggcaaggctttcgcctggagcacaatgatggaagaagagggaccatgccatgacgatgcctccaaggaggagaactgttgacgaccaaatttggtaagatatgaaccaggttcgatattggaatcgaagcggattcggtaaagaaatggattcgaagaacagagtatgcatcggctgagatggatcggacagaggacagccgatacagccgatagaggtgatgcaaccgattctgatgacgatggtttcgaggatgtttctagaatcgatcaaagtgcttcacagggattgccacgatagagataaagctctcagataggcaagtgtatctattaattaggatatttcgtgtaatttccttagagatatgtttgggcaaaagtctgctgcaaagacttatggtatcttagagtttgttagagataagagtcgtgtccggcaaggacatgttttgtaatctcgggtataaatagaacccgaacccatataatcaattatcacacgatcaatacaattttggcacatcgccaccctttttactttcgttttatttcgactagaggtaaacttgtcatggcggcttgcgttctcggaattagtgcttccatctttatgacactctaatattgtttatgtaatccgtcgagttatcatatatactttataatctttgttagtttcgctatataacttgtcatcggttggtttttactgctaagacatagccgatagagttagatctcattgctaatccagattatatagtatatctaccatcttttagaggttttcatcatctggtttagatcttacagttatcgttatgcttaatgttgtatcggttgggttcgatctattaagttctatttataactctaatatttaacttgttttatgattatcaatatagatagtgtcggagtttcagccgttcttacctgatttagctactttacgttttatatgcttgattgatatgctagatccgcgctttatattaagatcttatcgcattaaggtatattaggcttcttgtttaatatattctacttgttctgatatcttaataaagagtaatatcggagtattagccgatacatgctagatctatctaatcggctatgctataagcatttataatctttgtgttaatgcatatttcgatctaagtggtttatactgtctcggcatggcgaccgatctatcccaatcacttggtttaaatatacatcgacagaaggattgtatattgttaatatctacaaccgatcgagtagatttggtcttatcttatttttctataactgccgattgatctcaatatgacatcggcttgaagataaatgatatgtcatcggtgactggccgattggctatcgtttatggatttaaccgcgtttttcttgtctttctttcttgttgattgcaggatcaaatcaactggcacgctcacgaacctaaaagcaagattttggacctgtactgaagttaagcatatcttctagaccagtgtgtgtttttcacatcaacgggaacatcaagttagctaaatggcacggcaaggctttcgcctaaggttccctatccactcccacacacccaaccaatccgcacacataattgtcgcacgaatgccacactgccaccaccgggggccaagaagccagggtcggcatttgcaccgtcacaacagctgcactagatctgccgtacctccacacctcaccaacggtcatcgccagcaacaagccacctccaccgcacaccagcatgcaccgtccccaatagctaccaccctcaccaacgttgtacccatccgtgagggcctggatctgggtgtcggtgtcgctcgctccccaccaccaagcacgttggcgcctgcctcctgccggtggcacgttccccatcagctgccagcctcaccggcgctagatccggcctcgaaaggcccagatctggatgtcggcgccgcacggcagccatggctcctgcttgatggtcaccgtccgccaccactacgcacgctggctggctgactgcctcctgtcgggtactgtccccgtctgcggggctcactagtgctggatccagtcatggagggctcggatctaacagcggcgtctgcccggtcatcccatcgcctacagtatatgcgctcgggaggagagagccccaccgccgtcgtccttgaggccgctcggctctctagcgtgccattcgggcggcggcgaggtagaggaacaaggaatggtggtggcagcggtgcttggtggagcgccctccgggtcaccttgggagcgacacggacgggagtttttttccctattagagaaaaggctatcgaattggttctaggaaaaaaaaaagttaagaagcccagtagtttcgcacatagtatatcaatgaaatatgtgactttgtaaaatcactagtacggagtagcagttggtttgtcgtgttcagaaacatgaggtaaatttatggtgtggttgtacatatagtgccaaactgccaatgcattgtacaagggccgtggtttcgttttctttcactgtcaaattgatcatctcaatcggttttggccttttaggagcacaacgtatggttcggtaccacctgcaagtcctagagatttttcatgaacagcaggaccaaacggtgttactcatgatgaacagaaatatcttacatctgtattcctttaggctttattggtggtggctgttaatttgccacggtgccacccttaccattgctttcacagtttttatgaattatcttataatattttctaatattatgaaatagtcaatttttaattcaaacaagttgataccatatatttaaataagcaaacaattgttggtaacatattttataaaaataatatgtttcgatatgatatacaatattataatatattttctttttacccgtagtgaagtatggagattttgctattactcagagcaaagtactgagaaattttgctaagactgtaattagagatccacatcagtcctagaaatcaagaaatacatgtatataagtttgactttggcattgtcttattgttttttgtaaggctgaatatctgctcaaaaaaactgatgaaattaatactgaaaggctatgaaaaatcagctgcaagattttcagaaaaaatcaagacaagttactgtacataaaacggcttgtgtgatgatatgaatgaggaaatttgtgtggcggtgcagagaaaattgacattttgccattgtcaaaacggggtttcgctaaaatgacactctcaaaagtggtttcgttaaaatgccatccttagtcaggggcaacatgctgcaatgccatttcatccatttcttcttagtttaatgatttttttcttactgagatgaccaaaatacccttggatcctatctcatctctcttctcctacctcatctcttcgttgcagatggtggggcggcgccggcgcagctcgggaccgtcgctgaaccgctacgggatgagaaagctggccacaccggggatggcgccgacgccacccttcgccgccctcactagctcgacggcgaagctcaccgggttcacgcacaggttgccggcggtggcgatggcgaccaggaacggggaaggcggcgcgcctggggatggggaaagcgccggcacggacggggacgatggttcggctcggcggcgcggcgcaccaagcgctcgacttgaacgcgtgccacggcgtcacccccttctccgatgtgctcctcgacatgggcagcgacctgctcgcagcggagctccttgtcgaggcgacctgctcacgcgcgcagccgcagccagctcaaccccgcggcgtccagcagcttgagtgggccctccaacctcgccggggagagagatcgacgccggccatggtggagctcgctattgaagagggacttcaaaatccaccacggagttaagccgatttgagtgggatttgttgggggaattaatgaggaggacgagaggaaccaatttttgcattcaattttgggcgagagcaaccaaggagtgagatcaatttgggacatgagttcatcggagagagaatgatggtggcggacggaggtgaaagacgctcctggcaagccccacggctgaggcaagggcatttgggtcaaaccaaataagcaaaacagtagaaaacatttgcaaataataaaaattggttgaaatggcagtgtggcaagatggggtcgtttgaagatggcattataacgaagccacatttggcgatggcattctgacgaaaccccaacccgagaatggctaaatgtcaattttctcggcggtgcaagagtagaaaacaactactgattctaagcttctagctaatatctctatgattaggtgataatcatgtcgttgtgtccttcccattctgaaggaaaaagaaaaaaacgtttttgttgtattaccagaagtgatcctcttcattttgatgatttgtcacatcagcttttggcatttttgccactagctagatagttgataaaaccaacatttccacgtcacaacctgttaatatctcctggtctctacctgtttgcatccattgttgtccagtgaatttatgattagattttataggtgagctgtacatgtacattatcacagggcaaaagtttgctgctccaatcattcataactttgtatttttgtagggtttttttatgctatccgatgataacgaatttcagccatctgttattcctttttcttttccttttttttcccattatgtgctaacaatgatagattggaatgtgaagaaaaggcattactaatttgtttgcttgttaccgtaaatgttctgtaattcgtgactcctatggaagtccttttaagatcttttgaaaataaagaaaatctcacttacttacaactcgaaattccggtaattatttacaaggtgaatcacatatgagaacataaagggcacactttatcacacgactttgggtcaaatatctttatagaaaattactgccaccagaaataagttcattcttttcgttccattctgtaatcacgtgtttacagttttaaatatgtatatgcaaatttgttggattcctatcaaggtattcacaattttacataggcgataggttggcagcagaagagtgaacagagctaaaggaagcagtgataccgtcgagctaacacagatcgtgttggctactgagctttgctgccttcgtttagtcttctaattgttcagaacacatgaatcaatctactactcatcttgcacgggatgtcagctcacacctggaatttcgtagcagaagaaaaactcagtaatatttctgtttctaggcataaaaaaacacactattttagtgttagagcagcagccgagacaataaaaagggcacaggatcggagatggtaattcactgctttgcagtacttttacaaggtaactgcacggttagatgttaatctctatagacttttgtcgtcgccacatggaaaaataggtcagactgaatccaaagtcaattcagcaatttactctttttcgataatgaaattcgttctggcctttgctgaaagaagctacggccaactataattcagcaatttactacgaagaggagttagtttggtgagttcaaagttcaaacagatacctttttttgatgcaagctccttctcaacttctgaaaatatctccctcaacctgttggcagaattcgacataacattcttcacaaccttcttctgctgcttagctcccttcaaccaggcaatccctaacaatacctgaatgctgcaggtgcttggttttaaggacgtgctagtcatctgatacttgagctggatctgcggttttggattacaactggtgatcgcacaggatgaaagtaaaagtgaacattcacatgcatttctaatcgaactcagttttggcttttcttacactggagtagtcttcatgttggactccttggagggtcatcacctcctcaatgacccacccatctcgattcgctaagttatattttcgttgagtggttgatgcctctccaaagcgcgacaagattttgtcaaacttaaagctgatttgcctctggtatatgttttggtttagtagctcccattctgtaggcgagtaatcgacgcaaccagctttctgcatcaccttgtgctccaatggacctccggagaacatatccatcaaggaattgatctacaaatacagaactcacgggctgtagccagatgcttttgcaagtgcatcatatgagttccaattatgctgtttattgactagagagaaaaacttacatcaacagaaagaaccgccgagtagacttctgacattttcacatcttcattggctaatagagaaccttcttcacaagggagctgtttcagttcagaatttttgtcaatcatctctcccttctgttctggatccactgacctcattttccaaagtgccataataattctgtcagacataattgtgatatgttatcaaccgtttgaggtttgacaagataagctcactgcaaatatgatgggagattgggattccagctattgtttcatacgatgttgataaaagtacaaccaaaaaggatctattaacagttctattaaaaacatttagttttactttgcagtggcgcactcatgataacccgtgcggtgggaccgtggattattaccagtagtttattttttttatgtatgaccaatagatcaaattctgaacatgtaaatttctttaggccattatggtactacatctcaataaagctccttatatggaaaatttaaataaaataagttgtaaaaggaaaaggcacctgtgagcatcattgaatgaaacaaatgtctggaaatggtatttcagttttccttgaggatccagtgttttggctccatgtctggcttctagacctctgtccttgcggagaatgatcatcaaggatggacttccaacttttgctagggttggtggagcaacctggatatcatcaatgtcgtcccaaagaaagaaaaatttggtttttcggcctaatatattggaatagaatccaagtattcttgaggagagaaaaatgcgcccctgtaagaaattctatctatttcaattcttgatccaatagaccaaatatgtaaagaatacaatagttaaaaaaatgaaatgtggcaactggcaatgtgcgatacaatcattaacaagagcataaaaaatcactggttcaccatgaattcacagatatacaaaccccttgtgttgtgcttgctattttcttatagggaacttatagtcttggtctctaaacttgcaatgttctctcatatagctggatgaagttaaactaacattctaaggtacctaaatttacatgctgtgatctgtttagacctaattactgttaaatagaataattggaagatgtggcctcaaaacagctaaaggacatgtacttgcaccacaggcttactggacaccatgccaagctgtcttccatgacttaacagaggtaatgaccaaacaagtcaacatcagcagttttagggaccttaaattttggtttcaagtttagggacctatagtacagatctcttgttttccccttcctaaaggaagtaaggcttcaatgaaaacaaatgtacatatataataatgaaggaagtaatcttatatccgaaggttaaacttaaacttcataaagaatagcataaaagcctgtatcaggctataagccaacaacgacagcagaaatcagcagtgctgtctagcataccatattccatgtaataagtaacaaaaatccagctcaacacatcagaacaaataattagccctaattacctgaagtggcattttccgctttagataacaagtgaaatcatcgataagaaattcttctggaggaagactaaagagcttacggaacgctgaatttgtctgagcagaccgcaggtgtatctgagtattcagtcatatatgcaacttcagtaacagagcgcacttttgccgacaatggaattaaacaaacaccatccaaactcttaccttcttacctacttctttccccatctttgccagataattcataacaatttcagtcccacgcgagttgttcaaaaagattcgcaagtgtaacttaggctcacatccctggggaaaccttccatcaagaggaagccacatgtcacccaaatctgacaaattgtttttcaaaaagttcacttctgtttgaccaataggaattttattatgtggtccctctgaatcatgcacaactacttccaaccttgatggaggatcatccattgcattgaattcaaatatctctagaacagaaaaaagaaggtaagataaccaggaaaatgatctgcaaagatcataaggataagtaactttccaacatgaataatgtgggggcagaactgaccgttccatttcggttcggatgtctggaatttaactgagcttgttttcctctttccattacaggtaaaaacaacataaggatcaggcaagccaggtgtacctgaacctactacaccgcttccctcaataagtgcaacagtcagcaaccaaccatcaccatgagctttcaccccatgatcactacctaatattggaagagggaaaaaggttacatatgcttgtcatttatgatttatccccaagaacaggaaaagtcaattcttaggtgaatacagttttttttctgtttaaatcatttaaggacttagatcaattctagaaaagactaggtagaggaggatggagaaaaacataattcccactcattctgttagtgtttacagaataagcatgtacgctaatcaaaaggcatgtaaggtgagttcttttagataagagagaatcagttacctctttgtttccatgcatacaaaaaccgccgtcctgatttgaagatattctgcccctgaattatcaaaatggcacaaaatacaacctcccaaattgaatctgggagatcaataccaaaatattcgagcccatgcaccatatttggcttaactagacgaagatgtgcagtggcatacagtgctatacagagagagaatatgaatgcaaagtttccaaggaagcgggcagccagtttccaaattgattcttcctgtgtctgcaatgagcttaaaatctcgtctttgcttaagttagaatcatcaggcgcaatcactttggtcttctgggacagtacttcagtaaactgtgcatatccctctcggagtccttgttttgtcccgctctcgatcatccctttcaacattgtactctggacaaagttcagacgccaacttatagtaagatgtgatgtttgttctttagatggcaactgtggacctggtgttatacagtacagaatctccaccttgaaacaattaccacagggaacctcaggactgctaacactggaaagaacagcaaaagaatttccagctgcctttaagtatgtctgctcttcagtaatttttacagctttaactaatttgcttgcagcttttgtataacttaaagttcttttcaaacaatcattgcttacaagtttccaggggtcagtttggaatccgcttaacccttgaacttctgcaactgctggccagaaatctgaatgtgcagaaaacaacatggaattcatttcagttggttgaagaacataagattggtccacgagtataccaccacgcaagttttctggcatttcagaacctttatctttagactccagggatttcattagctcatttaaactagtttcagggagcgccccattatcaccattttcacaagattcagagttcatttgtgtatcttgaaactgctcatgatctgatgtggcagaaggtgcggcgtcaacaggtttccgacaaaagtagcgagacatgacttccactactgatgatgcattggtggtggcatcattgtcatcttcctcgggctccaaaagaatagatctttctgtgctgatacaagacagttgccctgggcttcgacggccttgctgatccatgatgccctggctcaacttatccatactgctgcaggatgccctttccatgctaggacaggctgacagatcaaggctactaacagaagccgataaggacgaggcagtggttccaactgacctcgctgataaggacgaggcagtggttcctactgacctcgctgataaggacgaggcagtggttccaactgacctcattgagctgcatggtgtatcattgataagttgcattggcatgtttctcggttcgtcgcaaatggctgtcctagataagtaaatcctcaagcgaatttcacccgcaactgcaatggaggagaattgaacagttaattatgctagctttggccactgctacattatacttttagcactgagtagcagcgaagcatccatctgatggatgtaaaataacatataagacctgtacatctaaaaaaagggttgtctacagaagcatcgctatataaattactttatttttggttcctcctatttgtcccaaaataaatttaattttttacaatcattgcattagaatttgtgaaaaaagtaagcaataattgcattgagatttgggaatagataaagtgaaaataattacattgcgatttaataaagtatggatattgctttatatttttatattgatatattgatattacattgcgatttaatgagtataatatttttgtttttatattgatatatgtgggatgggtgagaaatgaacttatttgcgaacggatggagtagcagttttttaagagtaaatttcattttgtaaaaaagaagaagaagaagaaggatgtgtcatgaacaacacagcatcacaacgaatcacctttgctaccatttctcctaccacatttctagtggttgcaatctaagcaggcaatccatggcaaggagaagctagggcaacgtaccgcgccgtttcttcctgaacctgccgcccttggagtggaggtggtaccacgccgtgccgagggagaggccgtccgccgccatgacggtcgagaggggcaccttgacccgccccaggaaccccccgccgaagtacccctcctcgttgagcacggacacgacgagctcctcctcggcgtcgccgacggcgaacccgaactcctcgtcccacagggggctgaggcacctcttcaccaccgtcgtcttcgccctccgcctccccatctgcagccgcacgtaggggtcgctgtgcccggtgaggtacgccgcctggagcccccgcgcctccagcacgtgcacgcacagccgcatcggcgcgctccccggccgctccccgccaccgccgctgccgccgcccaccgatctcgccattcgaggaggaggaggaggaggcggcaatggcgatggcgatctctggtttttctccggggaattggggattaatttggaggcgattacccgcggcgatttgaattgatgggggtgttcatctcgtcgggtgcatcgagattcgtgcggggaggagggagggggggtttgtggccatcggatctgcggagggaaggggtgatggtttcttcccgcccaacacgtggcaggttgctccgagcttcttgggtcgccacaggttaaaagcgtcttcagaagcgcctaattcagatggataaactggtcattatccagctaagagaactggtaaattatcgggtttcaaggatatgtaattatgttgtggcccggaaaaaaaaagccaaacggcatatttataaaaaaataatttataaataaaacctttatatacgtgttcttagcataaaaaagcaaagactaaaaaaaattttgataaaaaaaacccaaaatcaactttaaattttaaggttgaaaatttaaatttcgactaataagtataagcataagaagaatatttatcgtcggacaaccgacgcaagccataaaatcggatgctcatatcacagtaaccacatgcatacgcaacacaagaaaaaaaaagtgtgacgtcacatggtggagggagggatttgttgcatgcaaagagaggttttaattttaacttcaaacttttttattcaaatgaaccacttatatttgatttgcgatctgattataccattatatttattataattaattttttacgatacgatctcatatgactatattacgatgaacaaaagttatatgtttcaacaaataaaaaattgatgtttcatatgtgataagggaatgtttcaattaaaaatcaactttgttgcatatttttagtttgggtatttagtttgggtattgtttagttttcttgttgcaatgtatcttttcattaatgttgcacatggtattatttggaagtttcaataagtatttctttgatgttacacacttacactaggtcatgtgcatatgttgcacatggtattttgtgatgtctcaataattatagttaaatgtttcatgtgtgataaataccataaacattttaacaaaatcagatatttcacctattgtgactttatgtttcatgtagtggttgtgggtgttccaatatttctttcgtgttgcatctccctgaaacaatgctggaccacatgatgaaactttcttttatgagtagtgaaacaacgctcaatttttaaaatataagtgtaatatcttgtaaatatttaattgcaatgcatataacagtgtaaacggattatagatcagataaatgatttatgagaaaaaaggtatttaaagagtcgaaaaaaggtagttacgtatgagtactagtataatagtatattactccctccgtttcacaatgtaaaactttgtagcattgcccacgtacatatatatattaatgaatctagacacatacatataactatattcattaacataaatgtaaatatggaagtctttacattgtgaaacaaaggaagtagtagatgagaaaagagaggagagaagcggacactttttgcatggatgcgtcaggaacagaagggcagtaggctagcgaagaggcaacatgcaggcgggcacctgatcttgtgaaaaataatccaacgcctgatccgtagttatctcctaagcataagcgaaaagatgaagctctccattttcttggcacacaccactacaactagaatggatgagaagggatgcaatacacaaagaagcaaagataattttgcacgaatttcacaggaattgagatgcattcccacaccagatgggggtctggaagctgaatcaagataccattttgctattctttaccaagcatggtgtcaaaagtacatgcaactgctcaaaactaagactacacagtagtactgacacaaggtgagactcaaaaaacggagtgaaacagaggcaaaagcatcagttataaaatttgcaagttctcggtatgtttctccagtcccagagataagcttgacaaccattcatggctctttgattgcacacatgacaaatggcttcagcttgcagtgcagaatagaagcctgacggtgaaaaaccgatttctctgttgcttttgcaccatggcggagaactcccggcatggtagaagatcgaatacaggatcagaatcttgcaccttactctttgccgaagtctgcactgtagtgggcgctggattccagcttcttggcgtcgttcagcttcctgacagcctgaagtacaattcgcatgtaaactgtgagataatgtctaacagctggtgtgttggtagatagaagagagtataatgcggcgcaccttcatgaagtcctcatggacaacgtagtcccgttcagcacgaattgcagccatacccgcttcagtgcagacgttgcgaagatcagccccattgaagccctaaaaccaccagagtcaggaaggttgcccaagttgataaggaagttaaataagacaaactcacctcagccagtttaacaactgcctcataatcaatttctccatgcttggcaataccagcagcatggattttaagaacttccattcttgcttgctcatttggtagcggaatctcaatcttcctgtctagacgtccaggacgcagtagcgcagggtccagaacatcaggtctattggtagccatgatcattttcacctgtttaagcaaaaaagttcttgtcaagatgaaatcatgcatcatcaagcagcaatcattgtacatggtaccaaaaaaaccatacaaacaagagtaaccaactgtatctccaatttgattctgaacacacccaatttgattctgaacaaactaggaacatagacatagatggacaattgagcagtcaaaaaacctagattggtaagatgatcaattcgatcaattggaagagccaaaagtcatttcatcataaatctagattctaatatttgttgccagtgggaataattggcaaaaggtcaagccaccaacatgccacaactcacaatactacaacagggattataaacgaatcatcatgtcaatggtatgattttcaggattccaccaaggactgatcttaaggtatgcatacctttgcttaatactacactgtacagatcagctaatcttgtacaatggaggttgttaaaagaaaggtaaattagaatatattttccctcatcagtgtagttttacccaagaaagctagaccagaatgtagacatgcaaacatgctagcaagtaaactactttaatcaaactcacttgcatttacatactgcagtatgataccaaaataaaatgcagtatagccaaattatatgtctgatgaataagttacctttccaagttcatcaaatccatctaactgatttagcagttccatcagtgtgcgctggatctcgcgatcagcactagttccttcactgaaccgccgcccaccaatggcatcgatttcgtccatgaagattatgcatggctaggtaaagaaaatttgggaggcaaaactgagtgatggaaactaaatgaatgtgagttaaagtgattggagaaatgcaccgctagtgtccacatagcaacttaaatgtaaaggaagattatagcgtaaggattgttttaactttagaaccaacaataacttccacaatgtggatatgattatggttagatcatgtaaatgtcagagtaggtcttgcagaaatgaggatgccaatttaggtccaactagctttccagacaaaagtagagagagattaagacttacttgatgatcacgtgcatagccaaacatttccctaatcaagcgggcactctctccaatgtacttgtcaattatagcacttgaaacaatctgtttagccaaattatcagtacaaagaataattagtttgtaaaagatggctactacctattaagtgagcaaacgacacaccttcaaaaagttggcatcgatgttactggcaatagccctcgccaatagtgtcttaccagttcctggtggaccatagagtagaacaccctgcaatgagtaaagtaaaatataataacttccatagttgcaatatccatatatatgtctctgtgatctcatagtcacattacatgcactattagggatctaagtacaaataatgtaggatttaccttggggggcttgatcccaacacgaagaaagagctcagggttcattaagggcaattcgatggactccctgagctctctaatctgatcagacagaccaccaacagcagagtaactgacattaccagggtcttcatgaagcatgttgtaaaccacagggtccacctgaaggggggaaaaaagcagttttaaatcccagatcatcgatttttgtttaaaaaaattgctcctacagtaaaaggttcgacaaaaatgctccaatgaaaaaggaagatgatttttaaaaactaaatatacctcacgtggaagtgtgcgcatgattgtcagtgttgtcatgtcaagaacaacacgagttcccgaagtcaatttctccttgtccactttgctccggcaaccaaccacatatctgggaccactgctagccttaacaataacttgaagaaataggcgtttcagttgtttagttctaaaattctgttgataaaaaaaaatctaaaatgcaagcaatagcttcatataaaaatgctataagtaataattctatcaagttaattaacagtattgtagtcattttccatcattgaaggaaagaaatggcaaaagcaaatacttgtgatttttctgtagtgataaggagtggccaaagtaaaggatgtaaattcaacacaaaaaggaaatgctctttacttacaacgttcattatcaagagggcggagaacctctccgatgatctgcccaacactttgcagggattttaagtcatcttcggtctttgtaaagtccttcttagcattttttaggttttccctcactgcatatagatgaaccatgcatcaaagcaagatcaagcaaataaaaatgaaacaggctccaaaaagttctaaaagcaagcaaacatgtgttttaaatttacttgtattgttcccaaaaaacaaaacaaaacggcaaagacatgactagatgttgttcagttgcccaagaaaaaggtttgacttgagttccaaatgaactatagtagcaaagtttatggatgcaaagaaacttcagtatgggaatcatccaatagttaaaaaactaatcttctcctcctgttgtttatctataataacagggagtataagactaaaagagaagaaaccaaaggttggcatgtgaacaaacaagctgttacaactaaaccaaacaaaaaaaatatgggaaagaaatgatgcacaatcctacaatagctaacagttactactttactaacaataacaagccacgatttcatgcagctgaagtgtgttttcacgatcattaaactaaagaggaatgtgttttgactccacaaataacgctacttccttggaaggaaatttggctgaatatcctagtataatacaaaattatcaaagcaaataaatgactgctatcatcgcatgggtccctccaggctgagtattgccaagagcaagtactacaagcccctaaacacttgccccaagatccacataggatcacttgccacaagatgccacatagcatcatatgatgaggtggaggagagaagagacaagaagagagagaggaggagccaccactcatgcaaggggtagcctccacacaaactccaagagaaaggagagaaaagagaagagtagattggacaaacaaataaaacaaaattattagggttagtgcactagagttagtatatagaggtgatatattgtacatgccacctcttcattaatgaatagcctacatggacagaggtggcatctacctcttctataagacttgctctaagccatataaccctggttgccacattttttcctcaaaccacacatggtaatgagtatatgcatcacaaagcccatttgttagttgacattaactgggatgagccataatcccatgactaaagattacgagcattgtacctaagccttaactcattgactgccagcagcaaaagtataacctatgaaactacagtccaccagaagcatagtatatatgaaagagttctcaaggataccagtatattgattcaggcttaaataggtctagatatagacacctatggtgtactatacagctctcacttaactagaataatcaatccacgttttaaacaatgtggctgctctaagagactaatgaccacatcaggctagagtgctgcagcctacttgaagcatggaaactactgttgaagaagcagataatgcttgagttccatgaaaatcgcacccccacagtaccaaaatctcaaacaagttaaataaattctttagacattctcacaggaagcactttaaagttcaaaccataattagagacctaaatgacgcactaagaggagctagcacctccataatcatacagttgaaaaggaagaaaaactactgaaggatcaggaaatactcctccttgatcccgaatttatgagaggttggttatcactcacccaaatggtcagggttgactaatacaaaaatcctaagtctaatcacactacagacttcagatccaaatcgagcaaaaagtgcccaaatcaccagatttagcgctcgaaagaccaaaccgacctaatcaacctcgtaacccaacgcccagcgccccagaccgcgatctagcaccccgaacacgtcgcggaacaagtgattcccctagtaaatccccgaaatcaccagtactaagccaccctgccgaccgaatctacacacgagccactcttcatccaagtcatccgcagacgcggacgagatctaccgcgcgcgcaggccacgcggcggctagggtaacatcgcaacccatcgcctccgaaccctagggagatcggaagtcaagcaggggggaagtagaggggtggggagcgggcggctcaccggtgctgacgcgcgactcgagctccctgcagttgagcagcttcttccggtactccgtcacggaggcgcggcggcgggcggcggcggcgtcctccccgtcggccatctccggcgatctcgctctctctctctctctctctctcttcgccgccttttgcttctgtcgcaagaagagtagcgcacgagctcctttctctctctcggttgcgtaaatatcctaacgcgagctatacgccttcgctgcttccgctttcggtgtagcgaaaacgtatctgcttagagtacgtcttgttgtgggtttgtgaggtgtgtgtagtggcagtcgtatacggtgtatccagaaaagcactacgcttttggacttaactccgttcagagattctttttagataatggaataaatatctcagcctttgctcatcagagttacagccaattattataagaaatcatataaataatgagtgaagttcaaataaaattaaacacacccaacaataaaaaagaccaaaccaagaaaatgagcacacatttatttaaatctatttgtgaatctccatccatggttcgcaaatatttgcataaccgtcgtctccagtttacggcatgcaaccttcataaactctccatcatcttcacacttttgcagctttgcccaaaacctaagccaatatgttaccttaaatattacctgcatatatgagatagatgttgatttgtcaaaaatcatatcattcctactcaaccacagagcccaacaaatgacagatgctccaacgagtatgagttttacttatcttcttgtcaaccgcaaaaaccaaccatcaaacatattagatatggtactagggaggtttaaaccaaaagaaaattgtattgctccgttcagagatggagcgaacgaaataaagatgatgtcacgcgattgttttactctattttggatttagatcgaaataaagacaatgttactcatatggtttactctactttggaccaaatttaagatactggtatctaaatttatactccctccgtcctaagatataagaacatttaactgtatgggacgttcttagtacaccgtacattatactaagaaacatcttatccagtgttaagtttttatattttgggacaaaaggagtatggaaggatacacgtaaggtaaaaatagattaaccatatctaaattcttttttaatgtattcctagccccccctcccctctttttttttaatgtattcctagcccccccccccccctcttatagtgtggctttgctcatatctctgttccaaaacacataaacacagtacacatatcatatattatgtttatatatattttaggaagcggagagtatagaaatgaagagacacaggacatacagtttgactatttgttttaaaaaggaaggttgtaagtttagtttaatttttttcccaaaagctgggttgtgagatgttgcccgttcttaaaaaataagttgggttagaacgataaaaaagggttgggattttttttgtgtgttgcttcagtagtggcacccgcaaataggatttgcactttcttgatttgattttgtgatataggtgatgaaaacacattttttagctgtccattatcaaagcatgtgtgcatattacggtgccattgatacattggttactaccaatacaaagtcgactttttttataccgggctagccaaaggaggtctaccaagttacaactttattgaatcctaacaaaatcaaggagcgagcttactccaaactacaacattgtattgctcactcatgttagtagacatcctagcttctttctaaatagaaatatcatccttatttttcagaaaaaaatgtttggatggtgtgcttgtcttgtgattaaagatttttgcattgtgggccgttttggtttgaaacaaaaacatgccctaccaatttattggcaaattgaatagtatgagtgttagtttggattgagaccaaatatttggtagtggccctatcctatttggtcatattctagaagtttctccactatgatatgagaatttggctttatatcggtaacaattcaaatgttaactaaataattttatcctactaaaatactaccaatattttggtagtgtcagattttgccttagactttggcactactcatgaattggtagggtgaagaaccaaacaagccctgtattcctcctataggtcgacttgaattacctagagaatttgaattttaaaaagtaccattttgaatcacataggtattttattgactttagacaaatagaaaacgatggtgcactacaggacgttagagaaggatgacaatgcagggaagcaaaatgttattggaacaaaggagttcggtgaaattaagagacagtcttcaattcacttttaatgagtagcgcaatttggtatatacaactatttctttccagctttggatgctcttatatggcatcaacctcacacatgtttttccctaaaactacatacagctaaagtcaacttttatgcttgatgtaatgttggtatacagtgatagaaacttggaagcaatagttaaggagtgcaagcaataactttggttttcttttgtcctctcacctcctatatatcatgggagtagtgtatagagtatactgcgtgcaaaagttgtgcccactaaaacaactctctttttttttgtccctattaagaattggttagctagataacaaaagtgaaaacgactagataaggcattgacaaaaatacattctttattaaacattggaaaccatcaaattgcaaggattatatgataatattgagcaatgaccacttatgcctaaaatagttagtactaaaattaagatattgtagatttcaccaacaaatttagcaatataatttttatttgaacaatccatatattaaatagttcaagacatgctgccgcctgccggtagttgatagactttaacttgatactgcacaaaataaaagaaagagataattttattttcgcaagtgaggatttgtctcatttttttacaacaaatctcacttttgctactcattcatgcttgaatcaaaaacaaaatctatacgataataaaatgaaatatcatcattgaaagaaaacaaaagtgacatcagtaccataacctacgaaattgacagtttaacacatacactcgctctgtctcctataaaaaaccaaccaacttcaggaaatgaatatggacaagtagctatatatatttatccctagaagtttattctttttaggatagagggagaaggtaactacaaataaacgaatacactacctatatacaagcctatccaacttttcaagcggagcaaagattgaatatagttttaaaaaaacaccaaaaaagagaaaaaaaacctattttttttgttataaaaacacaagcaagaaaaatccctattttcctctgttaagacaagcaagcctttttctttaattatattcttctgttaagacaagcaagggaaaaaaatccttatttttcctctggttttgccctttttaggaaaaaaaatgcgagatcttcctgatccctccctctctctctctctctctctctcataaagtaggcgaagctgcagctgcagcggcatcagctgaagcagcagcagcagcacagaagcagcttcccttccttccgtatagtgtaacgtacgcatcaccacctcgcgggctggagatggagaaggagtaggagtaggagtgacgcctccggatttcccacgcctcgacgaacccccacaaccccgagatcgatcgggaggaggacgaccacgcccttcacctgcccccaaatcttgccccgatctcccccgaccgcggcaatgggggccgcctccgacgacgccgtcaagcagctcgccctcctcatggaccaaggtgggtgcgtgcgtgtgtgctttagttttcggctcgagctggccgggttcttggggtgatctgacgaggtgggggttgcttggatggatctttgcagtggaggcgccgctgaggaggacgtttcaggtacggatctggggtgccctatgtcggcagcctgtgccagcttggatcttggtgatggttcttgtagatttttgttgtagtctgtgtggttggatcatggtgtggattagctgattttagcagagctgcgtgatttgatctgatttagatcgtgagagcgagcttgtcagagttagggtctttatatctgatataatagatcattagtttaaaatggattttttttttttgaaaattacattattggtcaatgtagtgatggactgctagggaagtgatgtgattggataatggtgcttgatccatggacggaaacaaggaatgtagagtttgtgtaatgccaatgagtaagcgagggaatgctagcgtttgatttgtctagtgtagtaagtttaggggctttgcgtgttcaatgaaattcgcaatggttgcatgggttgacattcgttcatggcgagggaatcgtgctgtctcctgcaacagaggaagtgtctgaattatactgatctccaagtctattaaggagctaagttgttttggagttattcgacaatcatcattgagtatatcattcgctgctaccagttccataggaacttttctgagtgctggcgatattcctttcttggctactaatgtaaaccagctatgtagcctaaatctgttgacacgtgccaaatacatggcgttatcgcttgtcggtttcctaaatgttctctgaaagttaagaggcaacatgttacacgtatgaggttatgagatgtcaacttgtcctggagtggaatatactggttaggggagcgcaactaagtatgaaagttaccgcatcacaacctgtaagaaatgcagaatcaattctgtttgttgtagtggccaaggattgggaaacatgcagtaaccaaacaagtgatgtggctgctccattaactgaagctggactcttcctaactcctacgtacatgtttattgtttcagttgcatttcccttagaagatcaatagctgactcaatgcttgcttgatatttttactaagggcaagtactataatgtaccatatgttgcccctaagagtgccacattggattgagtgatgaggtggaggagagaagtgaggagagagaagatgagccacccctaaatcaagaggcaacctccacacaaatttcaaaaagtgtgtgagaatattagacatattggtatttgtgtactagaggtgatacattgtatgggttgccttttagttcatgagtgaataaaataaataaatttggagatggtagtcacatctatcatagcacttgccctaagaactagtcaactggggttaaaatggacgagagccacccaaagaacctgttattccattgtccatccaatcaccccttccaacaatagtttccagaaaaagcgattcagaattattcctctctttcctctatgcaacaatagtcaatacacttagttttattcctttctagagtcgtctgagagttacataatcttgaaaaagattgtcactatttgtgttcacaaaaatacttacaaccctgaagggaagtaaaccaaataccataaccagcatatattacactatataacctacctttgcaccaacagtccatacttgtatgcatgactagaacatatacataatgcagccattttatgttccttgggatatagtattcgttgctgattcttgaattccttcacttggatggtttttatgcgatatgattgatttgcaaatcatccttacatgtgacttgtgaagtgaatattgcttgaattaaggaatatctaaatgtatctcttttctcagaatgtgcaccagggctatcctaaagaaacattattgcgtttccttaaggccagagagtggaacgtatctaaggctcataaaatggtaacgaatttcatatttatccattctatactgaggagagatgatctcttgaatttattgttgcttagctggttatgtatatgcagcttgtagactctttgaattggaggattcaaaacgaaatcgatactgttctggaggtgactaactcttctagactacaatcctgtcagaaatttatggctgagtcgcttattggtcttcagtttcagtctcttgttactcatacctttcgtcaagcaaacttatagtcattatgttgatcttgcacgttatttcataattgctgatcactgtctacattgaccatatacagagacctatagtcccagtagatttgtacagatcaatccgtgattcacaacttgttggactctcaggatacacaaaggaggtatggccacactcccaaatgattgtgttgaagtatgtttcttgtccagcatacattgatcctgatgtaactatttgtctacatgttttactctatatgcatagaacatgcatgtgtttgtttcagtggggtttggcaaacaacttggttcgtagtttaatcatttacgggcgcatttcggttaattgtagtacttttgtagacaatagaaaaggtaaatacactgaatggtccgtaatctgatgtctcagtggcagcaatttttgggtctgtaaagcaagatatgacctaagattatcagtgtagaattcaaactagagtgtggtgtcttacaatatgttcttgctttaagttttgatcatttcagctgacttcatagcctttttattattagatactaggtaaattctcatgtgtttgatatgtataaaaatgcattatacatgtcccagcatggatttacaattaggataattttctcacttgcaattgtgcattcggcttgcccacttttaatgtcctttccgtagtgctattgattgacacataaggacttctagttcctgacttcctgtagatattttctattaaccatgcttactatccgctctctgatgctctttatgccaaaaataaatcaagaatgctactctggactctggttactaaaacgtaagaaatatgttactacatttttttcttctatttcttttatagggtctcccagtttttgccgttggtgttgggcagagcacatatgacaaagcttcggtaattatgagatgatgactactatttattgaataggctgcagccaaagtcatgaagctagattttactttttgttgtgtacttaaatgttagttgtgatggtgatgtaacttattgacataatattatcaccgattagtaacctaaatcatggttaatgatctcataagatcaacttacagttttgtggtgctctaccccattttacttaaacccactttgtccactaagagtagaaatattacattttcaggtccattactatgtgcaatctcatattcagattaatgagtaccgtgatcgtgtaattttggtgagtatgagaataaagattccaatatatttatgttaatgcatagaaacttttcttatgaaaatatatatctccaaattagcccatgttgacggaaaaatttgggcggcctgttaccacctgtgtaaaagttttggacatgactggcttgaagttgtcagcactgagccaaatgaaggtatgttttatgctattctttctcaaatttcatacaattttctctattacttccgttgtttctggcaatatagggtgacatgatttttgtcaatatggattacagatgttgacttcaatctcaacggttgatgatttgaactaccctgaaaaaacggagacgtactatgtagttaatgttccctatatattttctgcatgttggaaggtatatgatttattctagcctaatgctgtgctaataattttgtagtgaaagccgaaagctcagacatttcatttgatctttctggtaggttgtgaaacccctgttgcaggagaggacaaaaaagaaggttaaagttttgcatggttgtggaagagatgaacttctgaaggtaagttcagtaattcactgggctacttgtttcttttcacagatcgttcataacagagtgaatgtagtggcacagaacaaacgattcttccgttgattttcttcaatattagtatgttgaatatttcatttattggctaacgtagattatggactattcatctcttccacatttctgccgccgggagggctctggctcatccaaacattcatctactgacgctgatgactgctactcacttgaccatcctttccacaaagagctttatggtcacattgaggagctagcatcgtgcaaggaactcatcaagatgggatcattacatgtcagcattcccgagcctgaccccgatgacgcaaagattgttgaggtcatccaagctgaattccagaagatcggtgagcagaatggatccgccaatggtcacaaggtttagccaaaacattggccatctgcagaacaccttaaccagtgctggtgacttctgaatctgatgaagttgattactactgtccatgtcagtaattttgttgacaaccccccattttctggggggaatatagcagcagcagcagcagcaaggtcttgcatcattatattcccatgatgatgcaaataaacagtggtgcagccttgagttgatagaggaagagatgaaccagtcaccagtgtatatgaaattagatggaattgaaagccataaacatgtttttgttagtgtaacttacatatgttaaagctgttacaaggaaatccatggatgttgaaagacttctttaaaaaaaaaaagctgtcataagcttgagcgcatagttttgcaccaggatgttgaatggatcaaattttattttgtggattttattactaagatgtgaatggtaactttttctttgcatttagtagtaactacttgcaacaaaaatgagttggggaagtgagacagctggtaggggagggtgagacctgtggagaagcatatggccacagctcatggcagaggccacaggatgtatgcgcggcctgcatctggacgaacaccctgcaggcgtgcgaatgttagctggcgacctgaccttgacaagatctagggtgcgctccagtcgcgtcgcgcatggagccgtggcccgtggacagcgccgcgccgccgccgccgccgccggcgggttgagcttgcccgaggagcgggccgacgaacgcgctccggcgcgcgcgcgcctctgcctccggcaatggcatccgcgtcgccggcgggcggtggctctctcaaccttgtcgcacacacgaacggcgccggccgcgtgctcgatcggccgcggcgccgtggtagggctggtggtggcggcggttggcatgagcgcggcgcccggctagctttgcgcgctcgtgagatggttgagttgggagatcttctgttgcacgatggcgcgagcgtactggagtactccaatgtagtactccctcccaccgtttttatatctaagtttgattaagtttatatataaaaaaaagttagaaacatctataacactaaattagttttattttaaatataatgtgggtatgcttgttttgtgttaaaaattttagtatatctttttacaaacttaaaagaatttaattaggaaaataaaattcaaaatacttgtgatatgaaaccaagaattgtcgcaacagttgcgtacggtacggtacaaccaaattggcgacccattttttttggctcaacacagtataagcactaaccgtcttcagtagttccattccatggggcaaactaagtttaggattgatattaatttgatctgccgtcgaacagttacaaaggtaagttgatacttttgctcaacagatataatgaaacattgtccttgtaggcatgtaagcgcatctggtgtagtggtatcatagtaccctcccacggtactgaccagggttcgattccctggatgcgcattagttctacactcctttacttttttttgtcacaccaatatttcgtccaagatttctctgaagtagtacaggtcatttttttgttagtccaagatttttctgaagtagtccaactcatttcgcccaagcttcccctgattgatctatatttaagtttgtgctcaattcattccgcacttttttgttcatggatttgtcgacattaaagtttgtgcagtactacccccatgatcataccattaattaacatcggctacaggtagtgtattcgtagtgatcaatcatgttcagataccagtacgtgctatgaccattggaccatagattcttcaaatgatatcatgatatgatcagactaaggtagaagataaagtgcatagatatttttctcttttccttttcttatctttaggggttgtatttttctctcgctatatttaataaaaaggcacaatctcgtgttgttttctctttaaaaaaaaggtcatcgtaaattaaaaacgagaggagaaaaattataaaaggtaggatactttttcctgccatgtccttcagatttttcagatgcccagctttgctcaaggatcagaaagtgaaagatacgcatatcattttagccctgtgaaagaaagattgtgacgaagcaactgtttcttcaacaacatcagcatcctatctgatgcatcatcgctttgcatctgctttttcagtcttgtctttgcaaaaagaaacgacgaaaaaaaaaagaacggatggcaagtcacaggaatatgcctgcaggctagtctcctgtcaacgtgttgaaacttcttttatttatgtggatcattgcaataagcaaagcatcacaaatctccttatctttgccctgttgtttcaggcagaagatgattggatttcaatgtcgcacaagtaatccttaacttcagaacagaagcatggtgtttcatttcatagcttgtagcaatcagatgccttgagtaattcagaaggctctaaattcaagtcgtagtagtggaaattctaatctgatagttcaaaaaatgaaactacacaactagtaatgtttcaatttaggagaagtttatttggtgtaatgtaattcaaattctggtttgaaaaaggggaaagtggcatagttatgtacttaggttaagttctggaggttatgctgattgctgagctctggagcatgagaagaacatattcagaaataagaactacatctagataatcgtttgctacaagactacaagaggaacagagactatgtacaggaagggacaactcttttgaatttctatgccacaattttcgtggaatttgcatccaaagaacgaatatttttttttcacatgggcatgacggatcgattgacagttagtaactaattaatctggttgtaatcagatcactaacttaaaactagaaaaatgaatgtacatgacagaagtgtagccgagtactgtacaagcgccatccatcccctttctcgagctctctgcaataaaacaggaacatcaagaatcaatctcacctcaaattctcaatcaatcaaccatggcgaatcaaagcaaagaccatcaaagaaaagctcaatcgatcaaccatgccgaagcaaagactaacattaagctcaaccaatcaatcatggcaaagcaaagacgatcaataaggtgaagcaaagactatcgatatgctcaatcaatcgagcaaaggtgatcatggagctcaatcaaccaaccatggcgaagcaaagactaacaataatctcaatcaatcaagcaaagacgaccataaatctcaatcaaccatggcgaatcaaaggaaagattatcataaacctcaatcaatcaaccatagcaaagcaaaagactaccataagaaaagctcaactgatcaaccatggcgaagcaaagactaccaagaaggtcaaccaatcaaccatgtccaaataaaactaagaagtccagtcgatcgcgaatcgaagcaaagaagatcaatcaaccatggcgaatcgaagcaaagaggcaaagacgatcaagaagctcgatccatcaaccatggcaaatcaaagcaaagataatcaagaagctcaatccatcaaccatggcgaaacaaaaacaaagacgaccaacaagaatagaacaataagtaagtgtaccttgaatgagataattgacgacgatggcaacgacgacgaagggacgaggcccttgaaccccagatcgatcgagacgctgccgtcgggcttgaagaggccgtaatggcgctcggtggtcggccccggcttgaggttctcgttgaacagcgcgaagatgtacgccttggccaccctccccggcctgtacggcgtccccttgcgcaggaacagcctcttcctgaggttgaagttgtacgccctcgcgttcgccgggtcggcgccggcctccgtcgcgtcgccggcggacgcccacccggtctccgccaccctcacctccatctccgggtaccccgccgcctccagcgcgaagtaggccgcgtccacctgcgcctcgaacatgttgtcgtagcgcagcctcgtcttggcgtcgtagatgccggcgttgggcttgaacagcgcgtagttgacgtcgatgtgcgccgggtcgctcatgtaggcgaggaacgggtaggcgttgacgtagaacggcgcgccggtcttggagaagaagtccagcagcggcttgaggtacaccatgaggtcgtcgcggaacacgcacgccgacggcgggtaggagttggcgaacacggcctcggagtggggcgtggtgagctcgatcttggtggcgaggccgagcatcttgagcgcgtcgtggatgttgacgacggcgccgatgagggcctcggcgaggccggcgtcggcgccgccgaggacctcgttgccgacggtgatgccgacgatgcgggtggaggggtagtagggctggacgttctcgttcagccagtccatggccttggcggggctcgccgcgatgtccttcacctcgccgttggtcacggcgatcaccaggttgagccccgacccgcggaacgcgtcgaggacggtgtggtcggcgtcgtagatcttcacgttcttgatccgcgccatgcggaggagcttcaccacctccgtcggcggcggcaggttgtccgcgatcctgccgtagttcaccccgtacgtccccacgaacgacgacaccttcttcccgtcgcaccgcgcggcgagcagcccgagcaccaccaccaccaacaacaacaccaccccgccacgccgaagcatcaccggcggcgacggcggcggcggcggcgaggacagcaggaggacacgagcttttcttgcggtgcggggcatggcggcgcggcggcaagggccatcagcgaggcggcaagcacccacggctacttatcctcctccgatcctcctctcgctggtgaccttcctggttggggttggttgccgtggatggccggagcaagcgagggatcaaagttgccaagaacggaatggcaatggcggagcaagcatggaatccgatctcttgcgttgcatccgagctctcgtctattctctctctctgacacaaactgttcgtccgattccttgtccctgctgctctctctgtgtctccgagagaatgtcgggggagagagatctcacggtggcgcgccggcacggcagcgatggagcggtggccggcgaggtgaggaagctatactactagctaaagggagggaaatggaatgctgacaaggcaggcagatactgcagcaaagacaaagtgatgagtcatgactatcaacagtgtagaaaactacaaggattattgatccaactaaaggatggtagaccattgcaaatgtgtttggcattggcttttcgaaaacacttttatttatgtgaaaaaaattcaaatatgtcttttctacatacttcctcaatttcatgttataagacgttttgttatctctattcatcgtctagattcatatgatgcagacatatatttgaagcacatatagatccatgcataaatctattcgaaatagtgtaatatgaaacaaagcctattcgaaacccaaaaagtcttgtaatatgaaatagagcctattcaaaacccaaaagtcttagtaacattaaacagagaaagtagctcatttgaaatgtatgaatttcacatggtttccgtagaaaacaatttcatttttgctaaaaaaaatgtacataattcattgtctccaaaggagccttatggccccatcgtttggttattcggggaataaaccgaatggcatatttacaaacgaaaaataatgtgcaaataaaatttttatatattgttcttagcgatctgaaagcaataattgaaaaataaacttcgatgaaaaaaccccaaaatcagctttaaatttaagattaaaaatttaaattttggctgataattataagcacagccgaaaagatgaggttgttagttgtttacgtcaaaagtatattctagtctgtgacatagttgctgatcatagctagacttaactgcgagggtgtgccattagaataataactcttggaaccaatgtttttcctttctctaggcatttgaaagtttagctttgcaaaccaaattgtgtacgggctaacctcaaaagcaaccaactggcactacgttatctgaactctcactacgttgtttagtctttgcctagctttaggatttagctttacggttttaaacttttttctataagaattgccttgtccttttggaaccaaattgatcagatgtgagtcacatgcgtttggccaaattaaaagccaattgtatttttccagtatgatatgctaaagtggattcactcggtgatcatcataaaactgtgtgtagacacacaaaaaaaggagtggtctaggttcaatttatgaaaagagtgttttggataggtctctacatctctttaaagattccactttctcttcttaagcaaggataatgttttgatagggagagatggctgagaagtgagaaggcagtgcaagttgctagagtgcgaccgtgaacagtggtaaagccagcgagtctcgtcggttaacctaataagtcagagcaaaagccaaaattgaaattttcgaacttaattttaaagttgattttaagatattttcaacataatttttgtaatattggcttttaagttggtacgaataaatatatgaaagttttgcctatggattagtttttatttcctaataagttgttttagcgggaatatgggctggccagtgatgccatcgagcctgtacgaccaagagacttttcttgctacggactactttaagtggtgtttatttagacactaatttagagtattaaatataaactacttacaaaactaattacataaatgaaagctaatttgtgagataaattttttaagtctaattaatctataattagataatgtttactgtagcatcacataggctaatcatggattaattaggctcaatagattcgtctcgcgaattagtccaagattatggatgagttttattaatagcctatgtgtaatatttataattagtgtccaaacattcgatgtgatagagacgttttagtcccatctaaataaggtcttattcacgcgattttcacaatctatggtgtagcatatagcggtggagcccaaacggctgcatgactagcccgaaaatggagtctaaaactaacatacgcgttttatctggcattcaaatattcatcagtatacgtaaaatacctgaataatatttttagcagtgattttttaaaagcacgtatttacatgttccgtcgtattttagagttgaaaacgtctattttgaaactataggatgaaatgttaattgctttcttactagaaatttcaattggttactaaagagtatggacactgtcttagctaactagtaatttatttccataaaactacaggctatatggttgtaagatacagaaaatatgaattgtacacataattcaaagttctatggtttcatcgccctcatttaactatcatctcccgaaagcacatttgattcttcccgaatttttccagaaatgtgcatgcacaacatgcacaaaatttaaccttcttttaagtgcacaagtgttaattgcataggtgactactttgattttccatgcagtgatgctatgcccaaattttgaacgagcccttccctggcccacatttcagtcagatcatcagcagaaattggaaaaagtacaccgaaggcccctgaacttatcatcgagttaaaaaacatcctcaaaccgtaaaaccagatattcaacgtcccttaactaattaaaacaggttacaataggtccaggacagtattacacccggttttatccttgagtcagcgcgggacccacgtggatcccacgtgtaagcgtgtccacctcagctcctctctctttcctctcttctctcccttcctcatctctctcacttctctgcgctactggaggcgcggcggcgcgctgtccgcaacatccccgccggcggcgggtcatccaagttgtcatcgttgtcggccgcctcggcctccgccaccggcagcatgttgtcgtccacctcgtcaaccgccacgggtggcagcagcgctgccgcggtggcggccgcggccatgatgccgccgcaggcgcagctgtcgttcaagccctcgttgcaccacccactcggcggcggcgatcactacagcaccggtgcgtcgaggctagggtttcccggattgagctcgttggatcctgtcgactaccagctcggcagcggcggggctattggtggctggttaaggacgttgtcgctgtgcaaacttgccacagtgaaatgaatggttttgctttcttggtcagtaggagtgggcatatttagaccgaaccgaagaaccgacccgaaaataccgagaccgagaccgagaaattcggttatctgttcggtcccagccctcaaaagaccgaatttatttcggtcatttcggttattaggctcggttaaccgaataaccgaaatgaccgaaattttggcccaatagacttaggaagcccaataagcccactaaaacaaaccctagaagtgatactaaccctactactagtgcagcctcctcctccagcccccaccgtgccaccgccgccgcttcctccagcctccaccgcgccgccgcctccggctccgccctccaccgcgcggcggccgctgccgtcctccaccgcgccgcagccgacgccgccgtcctccaccgcgccgcggccgacgcctccgccctccaccgcgcgttccaaattttttcattccaaactctcctaaaaaatttcggtcagaccgagaccgagaccgaaaaaaccgagaccgaatttgccagtcctgagtttttttttgatgaaattcggtcctgagtttgcaaagaccgaactgaccgaaaaaccgaagaccgagaccgaatttttcggtctaaccgaacacccacccctattggtcaggacctgtactcgagtaatctcatggctcatctcattttacatggtactacatcccgtcgactaccagttcttgggcctcccggcaacctccaattctggggcggtggcaacggcgcaggcggcgacaatggaggcagcaccacaggtggcagcggcgccggtgtcgctccgggaggcggcgacgtcagcggcggcgcggctgggctgatctatccggattcaactcgtcatcggggaacatactgtgacacgatgcatttgccagcgatggatgatggatcaatgctgcaaaagaggtagaaccctaacgagccctgatctctccttctcgcgggcgctgaggcgctcgccatcgcattctgccctgcctccccgtcgacgtccgcgttgttcccgcctcgctgctgtccccgagtccatctttggccgccaccgggctgccgcgctgtgcttccccgctgccgccggcggccgccgtcgtggggacaccttcctcctctcccatctcaccccgctgactggctaggcagagaagacagagagagaggaggaaccaaggaagcgagagaagagagggaggatagagatgacgtggtatcctgacacgtagggtccacgctgactcagccgccacattgaataaaatcggactcaaaaccacaaaaggatataaagtgaacggttttgtaagttgagaaacgccggatatctgattttgcggtttgaggacgttttttactagatgacaagttgaggaaccttcgttgtactttttccgcagaaattccattcttgctgcccatgtgaaggatccagtgcataagctgggcctccgcgtcgcctggactaggcctcagctgggcccagaaaagagccaaaaggcccgcatcatttcggcttggaaaaagtacacccaaggtccctcaacttgtcatcgacatacaaaatcgtccacgaaccgcaaaaataccggacgacccttaactaacaaaacgttcgctttaggtccctcggtggttttgaccctgattttagcctacgtgacggttgagtcagcgtggaacccacgtggactccacatgtcagcgtgccacgtcaactctctcttttattgcagcagcaacagcaagcagcagttaatctcgccggaagaaaaaccaaagccggaggcgacgcgggagtcgttgtgcttcggcgacagctcggtcggcatcgccgccgccgccgccagtgactctgggcgcggcggtgctctggatcgcaagctgcaggcggcgaccacggcggtgtacggtgcctcgctgcacttcgggaaggagcttctcatccgggtcacgtggacgcagaacgctgccggagccaccggcctcgccgtcgtcgaggtgcgcccaccatgtgctgcacaagaagcgcgggagcaggtcctcgccaccgccactggcacggctgtgggcgtccactgggacaccgccgaggccacgtacgcgtcggattcgtagtcccctgagcccatcggcgaggcggcgtctactaccttgccgtcgtcgctgacgccgaggtcgcgctgctcctcggcgaggggtggcttggcttcttcctgcatgtgcaatgtgttactaacaaaacagttcagcttctctaattcgagttggtgattttattacagtgtaaatcatggtgtacatgaaagatataagtatgtctccagcttgacattgtatgaacatgggtacatgcatgctgatgtgagtgttttctggttatctgaatcgcaatcaaatggcatagatagatactgaacatggttacatggaaaaatgatgcttacattgcctccagatagcttcattcagatcaagcagaaacgctttgcattctctgcaacgatgctgccaactaatgactcgcatgagtcttccagcagatccaacaccagaaaaatatcgtgcaacgatagctgtccccttcctccccaccaccgccgccctctcgcgcgccggccgccgcctgccttctctttccccgtcgccgcctgcactacgacaaaaccggccgacggactgattggtggggatggcagcgagggacggcgcggtgctgaagccggtgctgagcgggttgtcgatgaagccggtgccgagcggtgaacgactccgagaggcacgcgccaccccgcggcggtcgacgtcaacctcatcctcgccgcccgagacggggacttaaacgacgcgagacggcctcgcctccacctccacgcccaacgccgcggcgcccgctcgcgcggggccacttcgctgacggcggcgacgcagcgtcgccgacgccattcgcgaccggccactgccgccgccgccggccggcttgcccaaagaagagaagagaagagaagagaagagagagagatagagagagagaggggggagaagggaaaggaggggaaagagggggaggcttatgtggccacactgacatgtagagcccacgtgggtcccacgctgactcaaccgtcacgtaaaccaaaaccggagtcaaaatcatcaaaggacccattttgacttgttttaattagttaagggaccccgaatatctggttgtacggttgggggtgttttcgaaactcggtgacaagttgagggaccttcggtgtactttttcctttcggcttctcctcctcttctcgtctccatgagaccatgactccatccatctctcgcccgtggctttaaggccccaattccaccttaaacccaagttaatagtatctccggtttttaatacggaacgctgttaatttttaatctagtattggaatattcatattgcttagaaaatttaatataaacttgctaaaatattgttaacagtgaaatttggtaatcggcaaagacgtcatcggcttagaatcattatcggctacagcatctcggaatcagccgatgggagttatcaagtcgtcaatagtcggattcctcctatattcgtttaaggaaattaatctactaaagaaagcttatccctaagtgaccgagtttaaagaggatgtggcatggcagtttatctattaattaggaatagtttgttagtttccttttatctttagaaaagtgtgtttaatgtcctataaggactttatcttttccttttatatttaggaaggtttctttcttgtccgacaaggacttgtatcaacctatgggtataaatatgtatacctggtgtcattgtaatctatcttcatgatcaatacaattcggcgcatcgccaccttttttacttctacttttgtttttacgttccgatgggacttggcacccgacgcggagctgcatcgtcttcgatctccggcgaagggataagtccaatgttccgccggtccaggcaattgtatcgtctacgtcggcgtcgttcaagactgcatcaatacattcgacctcttggattgctctggtttggatgatatatttacctacctatttatcatatgtctctgataatctagtcttagtatgtcaatttagctctatcgactgcttctcgttttagggtttctgccggtatcggctaaatcgcgttgctagattagattagcttagacatctaccaccctaaaaactcagtcaacggcttgattgtctaggtattatgtttcttttcatacctagtactgcattagttaagtttgatctactaagtcgtgcttagaaccataatctctagcctgcttcttgattgccaataagggtttcatcggggtttcagccggtgagttatctggatgctgcatcggcttataatgattgcatatacatataagttggatttagccgatgacaacaaaggtttcactgtttaatctaatcttgtggatttcatgatatcggacctccagccgatgtgtgctttaaccctcggatcgatgcttatttatcatatcattgctagccgattggtttatacaggactatattgttattttattatatcatcatcagccgattgcctttatatcattatctacattggatatatagccgattgcttaaaccctatggctatcggctggtatcggcatcggctgttatcggctatcggctggaactactccatcggcttgtcagccgatcggctgttttgatctgctatttgcatatcttgtcagttgcaggatcaaactgactggcacgcccgcatctcatcaatctttggacttgcacaggagctaagcagatcttccaggccgatgtgttcgatttttttcgtcaacaagtataagtcatacttaaattttttttagtggcaaaacatatcataaaaaataaataattgaataaaacaaatgtcctaatcggcggcgtggttgtggccacggtcacaagtggtccatagcccttactaccacggtggatattggcatgaggatgcccatcatgcagtcctcgagcccatctattgtggcacgtctcgctcgcctcctcttgctcacatcgctaccactatcaacgtatgtatgttggcttttacgagctcgcaaccactgtgaacgtgccttggcggcccacgcaagaatgaagagggtggcgaggatatagagcaacacaacgcctgtcacgtgatttctcgatatcatatgccttggagagtgatcaataccggtaaagctggagctcaggactagcaataggcttgcgggaaaggctagggatccatttcctctggtcacccatgcgcctatcttctctgttttctcccataccatcacagcccacctccatcaccgcctaactcaaagagataggagagatgaaagggaggggcaaaaggacatttcacatggtttcactgataaataaaaataaataaatataaacaatgataagggtggcacatcctaagagtaaaaatagttcactgtctcgttattagatgcccctagtatcacaacaccctcctaaatcataatttggaaaaaaaaagagaaaactctaatccactatatgaaaatgaataatgcttgaatgaaccactggaaatttaataacaccggatctgaaaaaatggctaataaataaaaccagaggtgacaaaaacaaaacaaaacagtagagagagaaaaaaacacacacacacacacacaatagttgcacagtgcagagacaagattggaaaaatagaaacgagttaaccacctccagcccaaacacagcaccaccccccctccaccaccccgctgtctcccctcctcctcctcttcctcccgcagaagccggcgtcctcccccctcccgcgaccgccgccgccgctccggcgaggtaaagaccgccatctctacctctctctctctctcgcctccctgcgctctcttgtgtgggccaagtcggcggcgcctgtcactggcatttcttggaaaccgtttcttggcctagatccgaccgcgtttacggttcttggattttgttttgcccttttcgtctccaagaacgtagtcgcggtcctcctcgtccgtgttgtcgaggcggggtagaggggagatcagatccgtgctcacttggggggttgatttgttttagttggtgatcgacactgacctgcttggattgtttcgagagtttggttaccgcatttttgtgttcttctgtgcagtttagcctaaatctgttcagttttactgcgaattgttttctgccggtgtagtagtactaagttggttgttgccataaggatgcccccgctttaggtgcatccctgcatcagggattcagtgagtttctgatgaattgaggacgaggtgaagattgatgagatggacggtaccattgccgatgctgtgggtgcgccgggtatagagaaagaggtcaatggaaagcctgcattgcctgatagcatggaggagcatgaggaagcacatgaggtgcaagccaatggtgaccattccggggagagcgatgtgatcaacccgcccgaagaggcgggcggggaatccacctcgcatcttgatggcaagaagcctcgccctgccaaggtgagttttgtggtagtgttctatgatcgtttagcgacgcttttgtgctcattgttgtttctgtatgatgtgatgctaggcaacccaaagtcatggtcctaaggttgtaaagtctaggagcccgaagagtggaggcgagggtcaagctaggagaagcactcctagttccactctttctaaagcaccggttgctcgagtctctcatgcagattcaagtactggatcaaagatcaatggtgactccagtgttgataggaatgtaagttctccattgtgctagactttctttctacttatgtaatcaatattatattcaatccagttgggtatcaaataatctgtttctcaatggttttatcagaaagctgagaagcaagagcctcgctccagtactaaggagacatctctcgaggactcaaagtatgcagttcttttcctgcctgtgtattcttgtatgtttaagcatgtagtgcctaatctaagttctaatcagcacaccttcagaggctaataggttgtgttgctaagtttgattaattatgaatttaaaatgcaaatattcgggagtaccatttcagaattcttggttttttttttgaggggggtgggggggggcatcatactgcaaaataaaaggattaaaacttgctcattctccattcagtgggattaacactatgtttcctgtacctaggacaataaaattgttcctcaatatccttctcatcatttaccaatctactgcaagaagtaccttcacttcagtatcagaaattgctttatgcattatcagcttctgaatgccttataccttatatggacatgctcaaccttgagcattgaaatatgatgcttcactgactcagtgttaaatgctaaattttacatataacaatcctagagaaatattctgtattattttacttgagctgacgtgaatctgtattattttacatatataacaatcctagagaaatattctcgcagttgcagttcagactccattgctctagtatagatgaatactccaaaagtaacttatgcttttatactcaaaccacataaatccagggagaaaaggaaaacacaaaagccattaggccagaattcttctgtcaaaaaggatgatgagtcaaatcctgaatcacgaaaggctggaggcactcctgcctacgggttctctttcaagtgtgatgagagagctgaaaaaaggaaggaggtaatttgtgttcaattacttcctgttcctggtcatcttttggaaaatatgcaactgtttcttactcaagtctgcaatcaaatagttctattcaaagctcgaggagaagattcatgccagagaaatggaaataagcaatttgcaagcaaaatcaaaggtaatattgttttacttttcttggaaatgttaccccatcttgcattgcatgtgttgcctgctaatattagtttctttatattgcacaggagactgaagaagctgaactcaaaatgcttaggaagagtttgaacttcaaggcaacaccaatgcccagcttctaccaggaaccaactcctccaaaggtggagttgaaaaaggtattcagagaccacaactcaaggctagcattcttcctttttacttcagatctaagagtgagcaagcgttggacagtttgcaacaacctactagagctctcttatgtagtcatcatatctcacaactataggagctctctagactctagtcaagccaaaaaacaaatagtggcctatttactcatcaccttagacattagacttgatacttgtcgcaaagtacctcactagctgtttagatgcctcatcctgtctgttctgccattgcttatctgttaagagcgagtgcatgtttctatcatgacacacaaaatttggaactttgactatatttatttggtgcggttcaactatattgttaccatgctcagtttggatgtactgggatttcctgcgatttagtgattatgctgttccataatactaatcaagcactgcatgggatagccttgattagacagggacagggacccagttaatggacttttgtgcagtaaaaacttgcagaaaccagcagctataaggttaaactaattggaagagattttgttaatttgtcttcaaatgtatttctggaaatgtgggatgcaattttttttttctgtttgcacagaacttgaatatttgcttactgttttgatgtttcctgatgtgtgatgggttaaattggtagttgtagctgatacatctagtgtgaggtgccattatgtagattgacctttgagggtggaatgcatgctaaggaatacctcgtacctatatatttattaggtcaaatacggtagctgggagatctggttataatgatgaaaggtgtcctttgatgggacaacacataccatctgctgttatttcttacttgctgtagatccctcccacgagagctagatcaccaaagctcggtcgctccaagaacaaatctgcgggagagaccgaggaaactgtcactcccccaggacgtccggtccgtctgagcctcgacagcctcgacgaaaaggtttctcaaaacggtgtaaagaaagcaaacccatcaaatgctgtgaagaagccccagaggaagtcactccccaaattgccatcggaggaaacgggtccatttgattcaagtcatctgaagaacactgaactgagcacaggtaacattcaggaatcagggtcgacgacaccaaatcaacaagaaactgagtcgaacaccagcatttccgagtcgatccaagacaggattgcaacaggtgggcaagaactcgacgaacagataattgcctagagaagatcgaagagcccggtggtcaaatccttttggtccgtgatggatggtgtgctgaagctttgcccccatattgtgctttaactgtttgagtagtaactagttgccagtatttcttttttctttttctttttttttttgtgacgaaccctacctcttcttcctgtgtattgcgttgtcgcgatggcttttgttcatatatcgctagtgaggctccagttgtccttcgctgtgtctatttactcctttgctgtaagtgccctgcttcactgttatgtataatcaatcagtgagaattttgttgcaatgtcctgagccccagaatattagaggaaaattctgaattttttgtgattgatttgaaatgttccaagtccagtttgaggtgctacttgacggcttaggcagagtcagagtcattccgacaggcgattcgttctactatgacggatggaagaagtcaggtgatgctatagattgactaataatgtattagtaaaccagattttttttaatgaaccatttttatcatggattcagttaagcctgacaacctgccaacaatgtggtcaagacatgtcaactgaagcactaaaaatgtccttgcagttgtgaccgatggttcaaatgctcgaaagttggccaagtctctagctagctagccattatggaattctgttgctctttcaaaatgttagaaccaaacatggaattagccaaagatggcaaaagaaaaactatcaagatgttgtattaaaggtaagataacagctttgattcctttcagtaacaaagctgtagctcacatttctaacatacaagatggcgaaacggcataggacttaaatcacactttgactactagtatcagttaagagaagctcgcactctcattttgcatatacatgtagctgtatgctttgaagagatgctcatcctccaaacaaaaaacataattacttcgcctgatgcaggaaagacaaggtaaatccacacagtaaacgagcagttcatacaccctttttgcctcataagataaatagatagatcaccaaggcattagcagagacatacataatcaaccgaaattccaaggcacatgatttttcacataaacacatacttaatttattctgagaaggttgcaaagattacagtcctcaacaatatgccggtaaaaacagggatctggtgaaaaaacaaccatacaaggctgtcatgacaaggctctagtatgcgccttgcaatggccagatcccccaacaccaggcattcccaagagtacctgtaacaaaaaatcaaccctctatgacccttacacactaccgaaaacatcatcacacatgacctcaagacaccaacagactcagtaaccatacacacagggtaagtctgcaggcactccagcgtcgtcggcagcctggaacaccggcgctgccgactactggtgacaccggcagttgagctgcggaactccatgacagcccccctgtgccgatgccggtgcctgcaacttcatgactaggaagcaagcagtaaagaaaaaaggacaagggacactacggcaacctaaaaaacaatcatggtgttgtgactatagcggcaaggaccaatgtctgggtagagggggcagaatgccagcaatggcagccgaaggctcaaaaaacagattgcctcttgaggcagtctgtgaaaaaacgagcacttggcggaaagcacccctcggaaacaaccggtcctcgaacaaatccagaacccaccatgactcatgcactagccaaaaacatgactagcacagcaattgactggttgcgctacctctaaggatgtatatctgcatctggaggtgcctcacccaagcacaggtgacaccctccagcaatgaaccatcttgtctgcctatgcgagaatgtcgcaccaccagagctgcttctccagcgatgcaatgttgtggttaccaatcatgttgcagaactgaagattgagaccctccaaagactgccccatgttgcccaagaatgacacgctcttcggagtaaccttcgagcaaccagacagtgacaggacacgaagcttgaggtgctttgctgatgccagggtagcaacaccattgtcactgaccatgcacttggacagatcgagctcagcaagctcagtgcaattctcggagatggcaaagaggctagcatcggttatcttgctgcagccctcaagactaacttgcttcagagattttccatgccccttcaccagggtagaaacagctgcatctgtgatgttcttgcaaccactcaaatcgaccttgactagaccaccctcggaagagttgatcagtggaagaagcccacggtcagtgacctcacggagaccactcaaatcaacctgctccaagtaagggcaaaccatccccaccacagccaagcttgcatcagtgaaatccgggcagtccttgatggtcaggaattgaagcgatttgcacagaggaagctgcgcaggcgtagagcagatgtccttgatacccatgcacttcaccaaagagagggacctgaacttcggaccgcagttgacgaggaaatcaagaataccaacaagagtaaccccattgcactcttcaagctgcaagctctccaacaacctcgccgattccgtgaaagccttgagaccggcatccgtcatgtgtccacacttcctgaaggaaagctgcctcaagctcgggcagaacttggcgatagcagcaagcgcgagattggtgaccccagggcaagaggtgacactcatgcacctcagattctgcaggccggcagcattggccatcacccaaaaccctctctccgcgaccaccgggaggcggacaagggtgagatccgtgacagccttcccgtagtacccgatcaaggcgagcgaagcatcagtgatgttcaaaccctgcagcctgatcttggtcagcgaggcggtcgcggagcacacgaggctggagatgccctggtcgccgatccgcgcgcaattcttgatgttcaatgcctgaatcttggagcaagatcggccaattgccctgaggccatcgttgccgacaccggagcacgactcgacagtgagagacagcaggttggggcagccgtgcgcgacggcggcgaggcccttgtctgtgatgagcgggcaacgggtgatgtccaggcgctccagcgaggggcaaccggcggcgatctcggcgaggccggcgtcggtgacgagcgggacatcccacagcgcgagcgagcagaggttggggctgccgcgggcgacggcgaggaggccccggtcggtgacgccgcgcgtcgggtggctcccgcggacggcgagcttctccagcccgcggcgggagccggcgacgacggccatggcggcgaggcggacgtcggtggcctccttgccctcgaggaccctctcgacgcacggatccaccacgggagacgactcctcctcctcgtcgtcctcctccatgacgaactcctcgttgaggtcgggaagggagggcggcgccgccgcggcggcagcagcggtggcctggttgagctcggaagcccggatgctgcagaggagggcgagccagcggcgggagacgcaggcggaggcgccgcgctcgcggccgccggggaggcgacggaggacctcgaagaggcactcgtcggggagcgcgtcgagcgacggcggctgccgctgctgcctctgcctcttcgccgccctcacgacgcagtccgccgccgcgaccgccgacgcggccaccagcgaccgcttcctctgctgctgctgcaccaccacgccgccgcggcagaacatcccggccagctccgccggcgccgacacgagacaccctccatctgaacaaaaaatcaagaatcaagaaaccaccattagacaaacacctcaaaccacctacatctgaacaaaaatcaacaatcaagaaaccaccattagacaaacacctcaaaccaaaacacaaatcaacaacaacaacaagaagaaagctcacctccgagtccatagaaagccaccatgtcgaagaagaagaacaagaacaatcacctaaaagagacccctccccccaacaacaacaagaagcatttacaggcgaaacgccgctgctgcagcagcgaagcggaaccctatcgccaaggcgatagggcaaaaaggagaggagtaaatcggagaggagagaggtgtcggagatggggaaagtggaggggggaacggaacgaacagaagaagggggaggagggggtagagggagatggactttagaggggtggagtgcggcgcggcgccgcgaggcgcgcggctcttgggggagacgagggggcgtcgcggtgcggatgtgggtggcggcaaggtgcatgcacggcacggacgcggggctggggcggatgcgatgaacctgtttgatgggtgtgggtgtgggggtgggtgcacgcaccatgaatggtgttggtggggatggggggtacggtggctaggtgcatgcatctgggtttttttcttcttttttttttgttgccttttttgtttctggaactggggcactgtacttcacgcgttgggaaaattaaataaaggagttagaatggcctcgttgggaacgttgctatttctaaaatcagatcaatctttaaaatagctgaacaaaagttgggtatattttattttctgattttttaaataagttaggcacagttgtaatctctaagtgctaaattgggttaaacagatcatattattataaatttttctgttttaaaaaaatactattactattcatcttattgtaacagtgccattatagatttgttgaaattggaaatatgctattacttactctttcagtatattttctaaattgcccctttcttcttccttttgtctctcttgtttatcatcttcactcggtttaagaagccgagaacgtccatggcatgggcgacagatgcggtcgtcgtggctgccgcacataagaagtgggaggtctcaaggacaggctctaggaacaacacctcgtgaatgaagaaggatttggtggagatgttcgagtggatgagaacacggaggagggtggtggcagtagcgcaatgcggcggcgaatcggttgggatataaggggtgcagactggggtgggcttagggtggggtggtttagggcggcgacaggcacgactcaatctcgacgcaaacttgagggtgagtttgtcgagctcgagtgcaaagaggagacgcggtgcgtcgaatctagccgtcaggctactgcttctcccttccgctgtcgctagtctcatcaacgggcaagcaccatggccactaatggttcagcacctggacgggagagaggggagagagtgagagggtaggggactaaggtacaagataaggggcaattttatcaaaaggatgttttagtgtagaaaaagggtaagtagtagcatatttccaattttaaaagatttgtaatggcactgttcataattttcaaaatgaacaaattaataatgacatgaatccaattaaccatagattaaattattgaccggaatataaacagtcattttaatacttattaattgcatgcatgtatataattcattgattttatcgtatggtggatgagttaattctttttttatcttggtgaaaaagaaatactatttttgtcaaaaaaataataacctagattggattttacatcatctatattcagattcgttgtactatatgttttcaaatccaatcctagtttttttttacggatggagtagtcacttggataaggggagtaacaggttacacatacgcatacttatgggtggatatcaggctagctcgctcgttaggtttttatcctaacgagctaaaagtttagctcaagccatcatatttatttagctcatgagccacggtgcggtggagtggagcagaggacgagcttcaggttgtcattggttgcgcgtaagaggatctcaggctcgtcaacaacttcattaccaggaaagctcgtgcttgccacagagtggatgagtagctacgttcggtggtggtgttaggtattggaggctaaggcgcgtgatataggtgcgtggcgggctagaggcgcgagatgccgatataaacttaagaatataaattcgttacagttttttttttatctgctctttacgtataatgaattgaacttgaaatgcatgactagaaatacatgcgcatgtatttttattttatttccagtgacatttgttagctgatccgtagcatcgaataaacgtgctagatttcgccgctaaaccatttcttcagcaaacgaacatggcaaagaactgcggtgtagtaactttaacggcaacttttttggaaaaaaaaactcacttatcaaacccaacaaaaagctttaaacatttattacgaaagcgaagtactactcctctgatcctccccctcctgcgcaacaataataaaggcgtgcagcacaaaaggaaaaaaaaaaagaaacgcatcgcggaaatgggaaaagaaaaaagagagaaaaaaaaaatccgcggagggcgaggcgtgtgcggctgtcgtccgagcgcgtcaccccaaccgcgttgcgtttcgtcacgtttcggcgggtgcagggaacccgggtcggtcggtcgctctcggccgtcgcgtgggcgttggccccccacacccttcgatccatcgccggatgcggtgcacggagccagggaggcaaaagggtccacggccatccacctctgatttccgctgccttttcgctggggattctcgcctatccgctccaccacagggtttaccttatcatttgggtcggggttatcaccaccacgcggtagcgcgataaccgtgataatcgcgcgataatcgtctaaaatcacacaaaaatcacatctaaaaatttgaattcaaaactcgacggtttcgtggtttcgccgcgataatcgcacagtttaccgcgataaccgcgatattcgcacggttatcgcgggctgtgtagctgaaatcatgtaaatgtaaaataaatagggtaaaacaataaaaaatacggttgaatatgtgtagaaaactagaaattcagaataattggaagaatatgtaggatacttaaggcccaatatcctcttcctttttcaatttgtaaatcatttttggttttgccctcaaatttgaatttagcttactctatttcaaaaaaattcttcaccattggcaattacaaatcaagaactacatccatgaattttttcaattttttttcgaatttttccagaattttgaatttggtcaaaattcatccaaaccatattgccggtttcccctaccgtacccccgcgataagcgcgataaccgcgataatcgcgcgattatcgtgcgataagtgaaaccctgtccaccactcgtacaaatcgggctcagcggctaacccatccccctcccggattgggattcggtgacattcccccgtgacattctcggtgatattgagtcactgacatgtgggtccagcacatgtgggtcccacatgtcattgactcgatgtcgctgagaatgtcacgggggaatgtcactgaatctgcgtcccccctccccccctctctctccccggtctccgattgcaacacgtcttgtcctgcgaggctgtaaagtggagtattacgcatagatcccatcgattgacctaataagtcaaagaaaagaaaactaaaatttaaatttttaaaattgaatttagaatattttcaacgtattttctttgtaacattggcttttaaatcgctacgaacaaatatctaaaagttttacttataaaatataatatttattttctaataggcagttttggtttattagagaatatatgagcaaccgatgaggatcatggatagtctcctgtttctttttacggattaatacacatgtgtcgatatattttgtgagattatatttgttgtcttattctggttttgaggcatatgtatgtgctgggagttttttcccttacttttcacaaacttcagcataaccaattagagttttcttgttaagcgagaccaacggctaccactgaaaggtaatacaggaggtcaagagtacatagtaccaataacgtagcgatggtgtcacatgagcgaaggtgaacaatgagtggtgccgaaggcgggatgagttaggtgatgacaaaatatgatgatacattttgtggatcaaagacaggaatataatggctcacagtctttcttgtcaatgttgaaccagttcagatgattagatggagatggccatgtgttgaaggtaggattgcaataataagacactaaatagcgtaatgagctcatttacatatcagtctataatccatatagaggtaaaacaaacagagctgttgagcttaaacgatgaaagagtgtttccctattaccgacaatgcttttactgtcgttttcaccaatcaatggtgaagatatcacgagagaactctggtttaaccgcccgatcgagctggctctataactgaatgttctaagcccacgtccacccatctagcatgccttttattgcggaggtgaatatatgcatagaatcatcataatctaatgattccaatagaattttcaaaaacacaataataaaatcatgttaatcataattaaacatagtatagctactttatcttagatctgcccttccccttgccgcccgccaccgcacactggtcgtacacatgctcctgccaaaaatataatacaaaccacttgcgatttctctaatggctacttgatcacgctgctgattgtgttaggctgttaagatttctctaatggcccaagctgatcaatgatgtgtagttgtgtactagtttattgtgtgcttagattaaactaatcactcgctggcagggtgtgatgagaagcttcttctagccaacacgcataatgattaacgaatcactcgcaacgatatagtttgaaccaaatgggatgcacctggacaaaggagactgattcggttaggcgcccgaaatctccaaaaatgggcgtgtttcccgttgctgatctctctcacgaattcacatggcgtccagatgagctgaatgcttgcaccagtacaccacacaagatgtgccgaatcggcctacttcttccttcttcttctttttttttccatagatcaaatcttgtaggagttttttttttcttttggtctcctgcagctatgtacccctccgtaccaaaaaaaaaaaaaaaagacaaaccctagtttctgtgtccaacgtttgaccgtctgttttatttgaaaaaattataaaaaaaattaagaagataagtcacacataaagtattaatcatgttttatcatctaataacaataaaaatactaattgtaaaaaaatttcatataagacggacagtcaaacgttggcacggaaatccagagtttgcctttttttttttttggacggagggagtatattccttctcttgtaaattgcggcagaacatcaccttctgttgtaaaatttgagaaaagtgtagcaatcaatcagtatatttgtttgagtgcagcatcagccaattttatattttaaattaatgtagatgttcgttttcatttttgttgctccgtcttgatttttgaatggacaagtaaagtacttgtagctacaggtttgaagtatggcgtcaacgaacacacatatgtgttttatgtttctcgaacgtttaaacgatatatttttcacaaaaatttttctgaaaaaagttttgtttctaaaacatattaatctatttttaaagtttttataagttattaattaattaattaatttgttttatgtgctaatgggaagggtttcagactcccttagggtgcgttctaatcggcgggatggtttagccgattagttacacgtaaaacgaaaaaacatgatttgtatatgattaattaaatattattatatgaaaacttaattaaaaaattgattagattttttaagcaacttatatactgaaagttttcgcatttagcagcttgtaaagtgtgttaacggaaaacgaggattagctaagccgctttagctgaaaagaacacacccttagcatgtgtttaattagagtggtaggatgggtcgggctgaaatgaaccggatatttatggtgtttggtctgaaaacagatggaataaaatgatcaaagaaatgaatccaagtcagcccatcctaaaaactggtggactaatccaaccaacttttcccttacgttaacaatatgagttataccttcacaccctaacatgataagattaatccaatccttatgccaaacgaatggatgaaatcatgtcatctcatctcaaaaaattaggatgcacctagcacatcctacaatatcttaaaactaaacacacgcttaaaaatatagctttagcaagatggaggaaaaacatattcatggacatacttccttcatcttatagaaattagatcctacaatgaatctgaatactaatattatgtaaaggaaaatgaatctggacatacctatggtagggtttgtttttactgacggaaggagtatagcgcacaggtgcatctgatatatgttgggctctatggttgagtaagaatgacatgatttttgataaatcatcatctgtttcatatatacaggtaaatttcagagcaacacattggctcaagtcatgggcacaactacaaaaggatgatgaagaggacgagtttttaaaagttacatgtcgaaatattgaggcaacggttatgcaactgttttctaattttagaaggagattaacaaatagaattcaataattgtgtacttcttaccttggattggtagtctttatattttgctttttcttcatggttagtgtccgtttttagttatgtgaactgtacacgttttaagtattacgttgtaataattagctatagctcgttgagctccattatcttaaaaatagcgcataggtgcacacacattgatgtgggttcgtgatgctgttgtcttccgtgtagcaaacaggctgtgtatgaatccagaagtttagatctaaacttgagtcctttttcatcacatcaatctatcatacacacataatttttcagtcacatcatctctaattttaactaaaatctaaaactagtactgtagactgtactaatccagcgagaagaagaatcgtactactactactactggcacgagatgtgtgttgcagtgcgcctgtgcccatcacccccaatatcgcccatccgggctacgtggcgcgccctggatcacgcgcgcgcgaatgtgtcgcaatcgtagcccccacgctgtcagtcacttcctcacccagtcgtcgggaagaaaaagaaaaataaaaggaaaaagaaaagaaaagaaagaaaggccgcgcgatacatgcactgcatccatccatccccctcacctcaccttttcgcactcgtcacgcgtacagctacagctacagcagcgagtgacttttcgcaagcgcgaaacgggagacgagagccacgcgagtccctctcgtcgcgtgccaccaccaccccgacgaggcgacgacgacgacgacgacgagcggcaagttgggcggcatccccacgcggcgcgcacatggggacacgtatgtttcacgggggtgtgatcgccgataatgagatagaaattgggggagtcgtcggtgacccggtcgttgttatctcggcggtgggggtgggtgtcacttggtgagagaccaggagccagcgaggcagccgtatggtcattgttatctcttactctagctttttctttttggagtggcagtcgtattttgaacgtattttttcccctttttttagagagttaagttccctttcttttttaagaaaaaaaagattgatagacaattcatgatgatgtttatgtaaccatccgggtaatctccatagggcataggctagtgaaatttgattatttgaaccctagcgagacgtcgtttttttctttctaatttcaaacaaaattttgaatcaaaacacctgaagcacacgattcgaggtggcttgatatgcttgaaattcactcaaaattcatcaagactatgaacgaggccattcataaagggtaatgtggcattaataaagaactccagaatgccacattatggtagtaggcccatacagtacttaattacagaatccaggcccatacacaagatgggccgggataaaggcccatacaaacgaggcccaagcagccaggctcagtccacgctgctactaccgcaccttgacctcggtgacgctcctcttcctctccggcgagcggggcacggtgacgtgcagcacgccgtccctcacctccgccgtgatcccctccgccaccgcgtcctccgggaggagcaggccggcgtggtacgtcgccgccgcccagcactcgccgtcgccgtcgcggccgcggtcctcctccaccacgtcgcgcttctcgccgtggatggcgagcacgccgtcgtccacgtagacgcggacgtcgtccttcccgaggcccggcacctcgaaccgcagcctgtaccgctcctcgtcctcccgcaccttccccgtcagcggccgggtcagcgtctccgccacctgcgacagcgcgctcccgatgcctgcgtgtgtacgtgcaagcaaccacgctcgtcaatgctcgccggcgtacaatggggaggagtaacagagttttttttatataactttttaatttttatttcaaaaataaacctttcttaaatttacttttaaaatctgagtctttgctacactaactcatatgacgtgaaaaaataatatcatcatgccacccgcagctgtcggatagtttagattagtcacactatttagattagtaatgtataataatgttgttttgtcacgtcagtcctaggctaaaaaattcatatattaaaaataagttctgaaaatgcttatttttaaaattaaaataaaataagaataagaaaatcaggagtaactaactgagtaagtggtacgttaccgtcgacgaggcggagcgggacgaagtcgcggaggtctcgccacggccagcggcggcgcgagcggtccacgacggcgacctcacggctgtgaccgtcgcctttcgcaggagcgcagccgccggtggtggcggcggcgtcggctcccgccgacgagaagagggcacgaaagttgagcggcccatgagaattggcagccgccgccgccaccggcgacgccgcgtgcagtggcctcgccagagcgcagccggcggcgaggcgtttgctgaggcattggcgagctaaagccatggccagcaaagtgtgtataaaatgctaatgcaccactaaaccgcagtgaagtgaatttgtcagttagttactctgcttgaagatggcgatgcgatcgtattgctgtgaagggtttcgcatataaagcgagaaagaacacgaggacaggagtccggagagaggcatctggaaaggaggcgaagacatccaaaaccctctggtagagcctgagaaatgaagcatattcaggagaagagaagtaggagtaccatctttgtctagtcagctcgacacaatcagcacacctgcataaacacggtaatggcctaatggacaaggggcaatcagctaaaggcattgccaagaggacgtcagatgcgacacatatccacctcgcggaaaaaaagaaaaaaaaactaaacagagcctgcacattgattagtaataacaatgtccaattatgcacagcgagaagatatcacaatatgaaacttatgttaacacaattagcagtaaagaatatgttacgtttacttaagatagggatgccatcctgtctccaggaataccgcagttatcacccacaagctttgaaaggctgaagtttttctgagtacattctcggtgattcataatttgaccccacaaacaacacccttcatcactcatttaacccactaatcatataggccttcctgctcccagccgtccacgaggaaatctaccatttcctgccaattgaaaaccgacagaaacttcatacattgtttttgcatgagacaagtgcggaaaatggggatgaagcatagttttgtaagagatcttacaccaagagggatcgcttgtggaaatggttttgtgcttcctagaaggctctcatatgtagcattccaactgcagtgacgggcacaggcatggtaaacagtcagcagtgcccaaatacaaactgatgagttggaagcagtatagacaacagaccttaggctagattttaccaagagtaacaagtcaggacctgtttgggagacaaatgccagccaggatcctggcctattcccaccgaaatgaaccaggctgggatcccggccaggattgcagctcccaaagtgtccctctaagaaataacagaactactagctcgtccttttcaaaggaggtatttaacatatctaatatatggcaaacaaggagatgaagtaataataatgcatactaggggactgttttggttcatgtcaaaacctcctaatcggctaatccataccttcgtgactcgacaattgaactagagataacttattgcatccatccatttttatataccactatttgactaggcatcttctaaattgaactttactataaatttctcgtgcaacatatcgttgctaatagaaaatcatgataatatgaaactacaatgggtacaaatctaacagtacatttctgtatcactagacctacaaatctagcattaccacttttgtatcaccacatctacacatatttagccacttttgcactcacttataaagtatgaataatttgaaataattgcaggaatctgtatatgaataccttatttttggctctcgaggttgttgacgctgagaattgtgccttctgtttccaacccactgttgcctagtctggttccacaggagaagtcctacggttgtacaagtagaataatcaacataaaagaacttaacctaacatgtacgtatagttcgtaataatgtaacgtaataacctagttccagtttggtaaagatcctttcgttttgagtttcttatacatgtatcttccttatacatgtattttgtaaaccaaatatacacatgactactctagaattcgatagccataaattccacgacgtcttatactagtattctaacgtaaactgagggctgactctggggatcaagattcagaaggcctgagaggaaatggttttgtccatgtggaaatgtggccactcacaggagtagttcacttcacttgcttcccaccattaaattacttatatatagtcaagtaagaaatttgttttgcaaatatatgcaggatgcattatttttagaattgctatggaccacataaacgctggaatttgaagataacagttgccatgtgctgaaatgcaatccatacgagcatgggaaactgaccctcaataagtatgaactacgggtttagcgttctctgaaagtatatggatattccaaaaaacagtatgggcacctgctgcctattttagttcaaacacggacagaagaatgcctttaccttgatttacaaactcatttgggttggtgctacttccagctccatgctgatcgctcgattgtgctgccgtactgattgaagacatgctacgctgagattgcatggcactattctccattcccggcgggcttgaactccaaaagtcctccgacaaactccgctgctttattgagcgcccttgaattcttaaaccttttgaaggctcatcaacggctattattggagtaggtttcgcacatccaaaacaatttctgctctgttgcaaaccagtattgactgataaatgattagcaccaagcaattgagagaagttacagatcaacaaacaagcaaaggattgtctaaaccaaaattgtatggaaaatacatatagttgatcacttgattagtacaggttttgcactgcttacgagtcctcactataaatgttcaattttttttcatttggttcgaagaagctgaagcaacagaaaacagttcaattcgcacaggaatagggttggatgtttgaagctataaatggtgcctaaattgaagtagcaggtttcaaggagctggtcattcctaaatggctggaataagcaggtgtcaaggattctaggtagagccaacaaaaacataataagacttcaacttgtgcgtagcataaatctgtttatacaaattatctagattgtagaacaaaaatgcagaactgaatttcccattgattgaaggagcaatagccaatcaatggattcaagcctacatgtatttagagtgaagttaacatatccttaagattgtactcatttgcaaataccagtaaacctgtacccttcaaattatagatatcatcaagcaacaaactctctagccagttatactctacagattgaaccagcatttagatataaaacgctactacagctaagtaaatttcccagataatagcagccagaattcttaaatgagccataacttcatttttttttctgcagttaaaaagaaaagtttttggatgacacaatggattaataagcaggcacaaataaatatacgctgcaatagtagtctaccgggggaaatctttcgctattctgtgttatcagctttattatgcgaaacctccttgagtccgctgtttgcaagctgcagggagcagaaaaaaggagctgaaaggaaacctaacagcagcaggccaaagggccaaaagtgctatgatgataacctgcattggtaggaaaccaccaaacattctcttgtgccactaatggccatcgacaaaaagacagagaacacatcgagcaatcatccaggtcattacaagcaggtcagacccatcataaccaacctcgctgattgggcacgagctggtcactacacatggttacaaacaaaatcgcgaaaaccttactaaatccatgaaatccgaacggggatcaatgtatgaacaccgaattcatcccgtcgaaccaacgaaatcgcgcctacccgcacgcatcaaactcgcctcatcatcccgcggcggctcccctaacactcgaaatcaaattctcgcgcgtcaatcagcacaacaccgaagcagccagggtgagggagagtcagaaaggcgtacccaacgcaggcgacgaggcgacgcacccacgacgtcagggacgagcagcctagcagcatagcatccggctccgcctcccccgcccccaccacggcgacagaagaatgaactgagctcaacctccccccacctccactcgaaaccctagcacaccccctcgaaaccctcctcctcctcctcctccacccgcgcccgatcaatcgatcgatccagagtacacgaacagacgaacacaaccacgaccgcgatggcgacggcgacggcgtgggcggcggcggaggcggaggcgggggggcttatctggtgcgagctatggaggggaggaggagggggggaatcattggagtagggtggggattgggtttgggtttgggtttgggtttggagggaggggatcacgcggggtgtacgtgggcagatggggcggaaaagctgggagagcgaccactccaccactccctctctctccgtcactgggaggatgacaggtggggccctgagggggagctggtaataatcatccaatcctcccgtggccattattgggtttgttagcatttagggcccccgttctgacttgattaacgtacatttcattttttttttcattagcacgtttttaaaaggctaaaagatatattccgtgtgagaattttttatagggaagttgctttaaaacaaaaggataaatttattttttttcaaatttataataattaatttaattaattatatgttaatgattttttttacgttccatgacttaattcatcttgatcgtgttcaaacgcagccttgatggtgttaatgaatgatgacgaagccaggataggcaaacgaaaaaaatagcacatgattaattaaattttagttactacaaatttaaaaaatagttttatttattttttctaacttatatagaaaattatcatacaaaacataacgtatcatttagtaatttaaaagacgcgctaaagaaaattgagaaaaataactagtaaaacatcttaataaaaatgagctattagcaaatgctaatgaaattaaatcgtcgtcgcggctcggacgtcggccttggagaggagaacgcctggcgtgcacggtgcaaccttacctggacgaataaacaacgatcatccttgcctcctgagtcttgcctgcttcaagagctctgtttgtaaaagtagcttagagttattttaagagctattttttacacaagaaatacccctccaatgaaatagctcttgagctgtttagatccaagggctatttggcgcctgagagttgaggtccaacgcatccacgccggcgtggggaggaggagcgtgtccggggccagtcaccgacggctgcgacggccagacgcttgggtcttcggagaagaaatcgaagccaccaccctccatggagaagaaaacaaatccaccagtgtggggcccggcgacggctcgggtgggggccggcggagccgcgattgacggctggcgaggagtgggggcgttggcgctggtggggaggaggaagtagcaagggcgtgggcgcctgcgaggagttgggcggcggcgcaggtgggggtcagcgacgcgacggagaggagtaggggcgacagagctagtgggggccagcggtgcggtgggcgacagccgccgcgccggcgaggagaggaggcggcggcggcggcgaaatgtgaggcgagtgcgcgctcagataaggtagagaaaaggatgtgcggtcgtgcggagagagagagccgcggctttctttttttttttgatcccgtgcaccagaaaggagagaaaagccacctttttaagtgggccacacccaaaatagctccaattagcaccccttaagtgggatagttttttggggtgggttatttccaaatagttctcaaatagctcaccattttggatcttttgggctattttagccatttgagggagggctaaaaaatatcccttgaatccaaacagggccgaggattacgtgttgctaaatcttcctctctttttttttaaaaaaaagagaaaggtattttttttatatggtctctacatccaattggatatatacggcaattgaaataggaaacttagctttgcaaacaatccaatctaaaatttgctcctatgaagatttattgaactcagaatcttgaggtactactcatgtcactgcaatcattaggctacgtgcccttccgtatcttaatcttggcagtaattaatccctcgccttgttcttccagctacgttgttgatagttaagtgtaacaataagtgtttaattcagctttttgtgctgtccattttgtattttagtgtgaaaccagtgcacgctgaggttaatgatagcacatatgaaagtgcatctaggacccctcatttattttggtgttaatgacaacacaattagagggtaactaatgttttttgttgagatgtatgcaaggatgaaaaaggagtggatgtcaacacaataagtattgcggcatcttttgtggtaattgtcttctaatccatgtatatcttgtgttcttgagtattaggatgccgtactattaagagggataccacatgcatataattggtagaacactagtgctcaaaatcatttatttgaagtgttcatgttttattcctgaatgtgcagagatgtagcctagtggggggagggtgaataggctttcctgaaattttctcaacaatcgcagcggttaaattgacagggcccggaacctactggtaatgaacaccggaatttccgggcaggatgagtagcccggaacttccgggcaggatgagtagcccggaacttccggagttcttgagccaggaacttccgggcagcagagaaaaaatgaaattaggggaagtaaaacaggtcctagctagagatgatcaggcacagagttgcacaagatgtaattctcaagataccagcagattcaaaaacagatcatgcacaagggagacaaaggcgatttttttccgaagttcggatcacacggatcctactctccgttgaggcgctcaaagagccgggtctcgattaaccccttgcctcacttatgcaaagatcccagaagaagtccacagccttcaactcaacacttctaggtcgttttctagaattgagtgaccaccaagatccaactcacaattccttctagaaaagaccacaagtgcaagttgctctacctaggacaacctctgaaaactcagcacaagaatctttactcacttacctcgtttccttgcggaggtgaggaaaaccttcacaaattttcccgggacatccacaagatctttggaagctcacgggcgacacctaatcgtctaggagaagatctccaagagtaataagcccaagtgacaacccacaaggtatccaaagtgctcaatcaaacctaatctttaagccatctccaaaacactcctacactctaatctaatctctcaatctcacaagataggctctagatttgagtggaggaagcaaaggaagcttgggagtggctagaaaaccctagaacatgaaagagctgaagtggaatggctaaagggtgacctggggacgaaatccatatatataacggctaggtgacgtcatctagccgttactcacaagtttgaactggaaatctgccaggacgttccgggcaaaagtgctaggaacttccgggcagcacttaggaaaaatctagttaaacttcggtgccgccgcatggacccgccgttgcgctcgcctgccaccacatggacccgccgttgcgctcgcccgccgcccgcccatcgcgctcactcgctgaagaagaagagaaagagaagaggtggcaaagaaaagttacgaaaaaacgatgtgtaactaacatgtgggccccacgtactttttttttgttgactaggatgccacgtcagcgaaaccacccacatatactgccatgggaccctcctttgaacggtttgtgcgagtttaggggtgcacatttatgatcttgtggtttagggacctaaaaaaaatctcacttgttaagttgagggaccaagggtgaacttattccaaagaagagagtgggacatgtcgaggcccacagaattattcgtatgggcctagaggataatgggccttgtgtggcccgacgagacggcgaaggcgacgacagagaggaacagcgacggcggcggcggcgtcgcgacgcccggaatcgcttcgcctcgcggggaacttgaccggggcaacggagggatcgccgtcgccgtcggccatcgctggggtacggttgggccgactggatcgcgggtcttgtccgtactcatcgcctatctccgccatctcgttttggctgcactgcagcttcctttcttctgaaacaaggcaagcaacttgcttaatgctatctccctttccgaataatcaaataatgctgatttttttagataatggatcaaatgttgattatctgagttaaattttgataacaacgatttcaggttagcacttattcttttattattagatttatttatttctcattgatattttgaatagtagtgttaacagtgaagagttgtacataattacatctttattaccgaagtaagagtggttaataaagtgtgcataattcatttaagactttcaataaattaggaagaggtgtttaaagtttaaagtttaggtaccatccccattcttaaatataagtatttttgtcttgattatttgccaaaaaataatgttaaaaacgaaagactctctttaagtcattgtgtggtaaaatttttaaaatgcttggattattctcattgagaactgcgctagcgtagttggcaggtgcagccgtcgtgctctcctaccacccatgctcctggtaatctagcggttcgattacatgattagtcaaaaatagtataattcttaggctttaaaataagggtctcggtggctaaaaaattaccctagaaatacttacagttacagtatatattactccctccgttctataatatgataacctagcaccgtataagacttattttagtattgtgagtctatattaggataagtctcattaaattatgacgaatgtagtactataaaaatggttgagtattttttttcgaagggagtagtagtatactccttccgtcccaaaataagtgcagttttacactattcacgtttaacgtttgaccattcgtcttatttgaaaattttttatgattagtatttttattgctcttagatgataaaacatgaatagtaatttatgtgtgactaaatatttttaaattttttataaatttttcaaataagacggacggtcaaacattgggcacggatattcacggttgcacttattttaggacggaggtagtaaaatttaaatttaaaaaaacgagcgcgtctaactctgacatgatattctgaggtcagatcgtgcgtcaacttccgtgtacttttccttgtttttgccgtgccgtcctgaacgtccgtacgggcagagatggacgggccagatttggacggcttgctgatacgtccttctatacgatattgccatattagtcgtgtactatgatagatactccgtctctgaatgcgcacaagattcagaacttccgttacattcgatgaatttcgttaaattaaattatagtatgcccccaagactaagacattttactgtcgatgaagtgcaagtccaagctgaaatcaaaaccgtgggctaccttagttttggtgtttttgcagttatccatattgttatcgttttcttttctttatcggagcttcagtaatcagaaacccactttcatacacaactaatttaatttagttttagttcctttatatacgaatggcataattagtcaactaattgaaacaaataacatgtgaataccgtgtgtttaactgctggtttgtgtggtgtgcctgtatgcttgatttattcaatctgtcagttgatcgatgctccaagtaataaacttagaagaaaaggagccccggtagttttgtaggagagagttgactttaagctaaagtttgacaaaagaaattctcttgcaatatcttattactaatggaaatagttaatatgggcctgttcactttgatgccattttcaaccataccatttcttttggtaaagttgctaaaaaatatctacgtttagtttgttaccaaatttggtaaatacataagaaatcttgtcaaaattttgataatattgccatcttgccaaaggtttattttagctacaatctaaacatgccctatatgttcaaacagataagtagcggtatgggctttgtgtctctaaacttaattattattaagggtctcatttttttatttatacttatacttatcagccaaaatttaaatttctaatcttaaatttgtagttgattttggggtcttttcatcgaagtttatttttcagcatttgcttttagatcgctaagaacacttatataacagttttattgatgaattatttttcgtttacaaatatgccgtttcgcttattttccgaataagcgaaacgatgggtccgtaaatattctaactccattgtcaccaaacttaaaacagataagtatttacgcaacaaaggaagtatgcgaaaatttacaaataaaagaagtatgcaagtcctaacctcttatacatcttccacaattacaactcactactaaaatttgtattcttttgtactgttaataacatagatataattttttattgaaaattatttttatttgattcgttcatttttcacggcttatcaatcatgtgcaacacaaacaatccggtcccttaggggctgttctttcaacttaacacgctacattttagattgccacacccttcttagctttacgtttcgttcattgtcatatgtatggtttggcacacttttttatctcattattccatgtgtcgtatactcaattatttgtccaatttaatcacatgtgtgacctagaattaattaaaggaaaatttgcacaaaaaaaactccgtaagtcactttaagtttgatattctaatcgataagtcatttcgttgtaaatacccacctacctactctattttgtttcaaaaatcaccccagtgagcacatgtatgaccgaatcaatatgtttttatatattttgagccgtcaatgtggtctttaccaaaattaaatacttttatagtataatcttcacacttctttttttgcagattccacaaatagaaatactaataatagtgtaaatattgtcgcacttgggtatcacgatatacataaaaagttcactaaaacatgaagaataaatttaatgtaaacacttggacaaaattgactcagctagattagtctacagtagctctacatcagcgataataggttgatccgattaagtacgtatacactgaggtggttttttaacaaaactgagtaggtgtgtgagcatttgtaacaaaatgatttatgggatgatttttgcaaattttccttaatttaaaaggtcaaaagaaaaggtgatgacaaattacatttgcctaacgtgagttctgatcctgttagttagttaagaaccacacaacccgtaatacttgtggggtcacgtgctgagatcacgaacctgcatgaacaaaatgaagtaaatggaaaagaagaggggccatgacgacgaacgcactctgaacttgtggagaaagaacgccagccacaccaacaccaggaagagaaactgctccgaaaatgcagcggtcaaccgcagttgagcagcgtgacctcaccatcggcggaatgacgccggcgacggcacggccatttccacgccttgcatcccaaaaggaaagggtgtaggacggaccactgcaactcgcagaaattaattagcggaggacttgtgttgggcggccgcgagggagataaacaattagcgtcacttcgtttgtaattataagttgggactgtctacttctaatttaacagaaaaccccttctaatatcttacaattttttgaccattggattgatttgagattcatgcaaaccccatcaaaccctaaccacttttcctttttcctccttgccgccgcacaacgctcgagcgctccttccctcctctcagcactgcgcgcctccttcaccgccgccgccgccccaccgtgccgccacccagcctcgccggctggccgaaaagtgtcaacgacgccggtgaggccccgccggctggccccctcccctcctttgcctcaagccggcggcggcgcgctgtccgtcgtcttccccgtcgccggcggcggggcgccaccaccgactgcctcctcctaccactctttccgctttgcccccgccgcctacaccggcccatcgcccgcttccgaccccgcggcttcggcggcggtgccgccgcctcgccgcccgcccgatctgccgcccatcaccgggctgccgcctcccacggtcatccctctaaagccggcgaactcccccctcttccccctcccttcccccctcccacccccacccaccccgggaccctaattcgtcggccctctgccggagtttgggttcacaagcgctagagaagaagaggtggtcgccggagttggagaagaagagcatgaatcgtgaagcacatccagtgatccaaaatttgcaagatttgaggttgtgttttctgtcgacagaaatttagcatttccgttataagttgcgattatagatcgcaccgaaacagtttcagctccgatctaaatataagagtagaattggatgaaaaataaactagagatgtggagctgggtttaggctgcttaataattttatttctaatctaactcctgatgttaaatttagaagttagatctctattagacgggccttactaatcggcaacggagtttgaaagaaaaaacgaaaaaggaaaagaaaattgatcgccatggattagctccataaactgggttactctatattacaccatcagagtattatctctgttggtctgctacttcttgtcctcagattgctttagtttagctcttacgtcacattacacgctagcttatacctttaacacaaacattaggatttgcagtcagctttgaccatgaggcccgaccgcccggtaaccctccgaagcaaaacaactttattgtttgtctttttagctgattaattatgatatagtaaaagtttaatatttaaaacttaattttcagaattgactttgagacttttctttatggtagtttatttgtcaacattatgttgataatagctaagaacacagaagttataaaagcacaactcataaattactttttcttctaataaaccgtcttatggtttatcagctgcagggtgcacgattagactgaagctttttgtacttcatccgtccctaaaaactattacagtaaatctggatataaaaaatcatatcttaccgtatattgattttttatgggttagagaaactagtaagtaaaaagaaaaatcatatgcttagactgcatggatgtggaggcatgaagcgtgcgcttaattgcaaatttaactgctttttaggagctctcctaaaattaaaagcaaagcacatggaaaaaaaagtctcctcacatgcttctctagaaaatcatatcaaatcaaagtatcaaacaaaatcaaattaaaaatttgcaagaagagaggacttagtcctagtttattttgctcctgacccgcatgaacgctcaccagaatatacctgttggtaccaccatttctttacacccaaaaaaattggataaaggaatcttcctcacctgccgggtaacatgcgccccaaccgttttccgatccaattcgaccgagccgaaatcacatgtgcccccatattctagtatttcgagtaaatttattttcctcggcaataaaaatcaatcccaatttacagataatagaaaccaattgatttattatacagataataaaaaaaattcatgatggtgtattcggtttcctaaagcaaagatgcaaggacttgtctcgtgttcaacaacatgacttttgacttgatctctcgtcgtgttcacaacaatttcttttgccatctcctttttaccttttttttttgagataaatgagatgaaatcgagcatatacaaacgaaaaggagattaaataaaaaaaactacacttgaatgacgaacaccacttttgactttaatctctcgtcgagttcacaaccacttttgacatggcaaatcgtctctttttttcccttttctttgagataaaaaagagaagaaatcgagtatttacaaacctagaggagattcaaaaactacttaaaaataaaatatactaatccatccactgtacagtagagatgtactggatccacacaaagtcaacaactgcctctgtcttcctgtctttcgaagcaaagacgcacgagaaagagagagaaaaaacaagcaaaaaaaaagttaaccaaaagcaagcggaggatgatgattaattagcttaattgcgagagcctaatcaatcgagcaaccgcggcggccgccggcggcgaggcggcggcgaggaggcggtggtcagcaggagtaggtgaccctgtgggaggagcggtcgcggagcatgccgcggtacaacgcctcccggttcgccggcatccgctccgccgccgcggccgccgccgcgtcgcccctgcacgtgtgctcctccgccgccgcgagccgccgcgccgggcgggcggcgccctcattgtcgacgacgtccgccgcgaaccgcacccgcctcccgctcctccgcctccgcctctctgcaccgcacacacaaaccaccgtgagaaatccatccacgcatgtcgtcgtcgaggaatcgaatcgaatcgaagggatccggtgacgaacccacccacctgaggaggaggaggaggaggagaggcaggggcggagggaagcctccgcctccgcctccgcctccgccgccgccgcgggcctcgcggcgcggcagagggagaagatgacgatggagccggacaccgcgacggcggtggcggcggcgagcgcgagagacccaccaccacccgacgacgacgaggacgacgccatgggcggcgttggaagagcagaagtaggtggtggctagctacgactaggtaggtaggcctcgcgagaacaaagctaagctcgtattaatggcgagctcgcgaagagaagaaaaaaaaagggagatgagaggatttggtttggtttaattcagatttcgggtgcggctgccttggtgatatataggcttgatgatgccgtaatttaattttaatttttatcgtgttgaccgaattgtgctctctatctcctcgacacaaacgtcgttttttcagttggttgagctactgctggtaataatacggttgtttcttttataatttttatttatctactcccccggattgataatacttgttgttttgaaaaagtttactgtctataaaaacaattttgataattatttttcattataatatgtataaaagtgttaataaatatttgattttattaaagtactttttaagactaatctacgtcactatatttaaaagataaatattttaaaaatgatttataatcaaatattctaaagtttgatatcacccttgtctaaaatgacaagtattatcaatccggaggaaatatatatatacgttattaaagatttataaaagttaagattttaaaaatatagtacctccttatatgacgtttagataaaaaagacacggagggagtactaagataaaaaatcaaatcaaattaaaattatttttaaatcatactgtgagaaagcttaaaatgttactggagttagggtttataagaagacgcggattttcgatagcagaggatgttttcgcaagtgagtcatgtatcccgagaaaaaaaatgtgaaacaatattcagggggcaattttatccagagggcagcattaatttgttgctacttgtggtacaatgttttttaataatcaatttgaaggtgcatgcttgttctattttaggaacggtgtttgttactcgtagtacattttttttataaaaaaataccaaccaacaaacgaccattttatttaatacgaataattgaatcaggaggacttgcagttgcggtttgatgaatttagtaatccaaatgattattggatgggacgtgtacatacctcccctacaataccggccggcaactcgagttttttttttaacttctttttttttagaacggcaacttgagttacttctgttttccgaaggcagcaaggggttttgtactatttctgcatcccgaacaatttcaactatattttgtgaaatattcttctaagatatgcactgccagccaagccttgatattaacttatccttgtgatcttataattcttaaacccagcaaggcagcaagtactcagcgttgctcaatttttatctttatcatccctagatgataacaattcaggggacttaaatagtcataaaaatttaaaataatttaacaaactagatcatttgtgataaatcactccatgagtgtccatgttaaaatttgacaaaaaaaatacgcatgtatttagatcatatttatttgttttcctcgtataggtcgaatttaaatatatatgtttatatatgtcaaaaaaacaattttaccatagtttaattgaaacaaataccacacgagttccatcattttttaaaaaaaaaagaagtcgaaaacgatgctgcttactccctctgttccaaaaagaaaaagatcattcctagcatcccaaagtgaaattagtggagagtaaaatgactaaaatacccctcactattgaaaaaaagtagtaatggtgataggtaggtagaggatagataaaacttcctgttttatgtgatgagcgtagataggatggtataaggttttttttctttttgacataactcaaactctggaagttgaactttttttaagacggagagagtagatggttaatataatactaaattaaatcacaatatccataaatacaatattgtgtgtatctttggtgaatgcaaaggctgaaaattacttcttttgtcgaaggaactacaagggaaaaaaagacaagcaacccttccatactatgggattaccttaggtggtgttcttttattatgtagatgaagataaatatgaatatcaagtgttttacttaaaacgaggtgttattaaactatgattaattgagttttgattattacaaacttgagaaatagattaatttgatattttagagcaactttcatattgaaagttttcgcaccaaacataccgtttaacagtttgaaaagcgtgccacgaaaaatcttcatattcatccaagagttgttgggaaaaaaaggggacactcttttcatcctgaaataaagagtaaatttcacattgcaccatatattttgaccaaagttttacaatgggtaagggccaacccaaccttttcacttagcatcaaatatctttgcactagttgtcactttggactagggttgagcaaatcaatggaagttgtcagagaaaagctagttcaaattatcatttttagttccatagtattaagataaatatctttagaaagaaatagcaaatcacactaaaataatgatgcaacatgtttaaaagtggcacaaaatgatctatacataggggcaaatgaataaaaataaaatactagaaaatagttaattaccactcacactgaaaataaggaagaaaacataaaatgttttgccttttataattatccatgtgtaaatcatatgaagttttctcacattcccttgctttgctcacctctagtccaaactgaaaacttatttaaagatgtatggtgttaagtgaaaacattgatttaaccctagtccattatgaaatcttggccaaaatatgtggcctaatgtgaaatttactctgaaataaattaacctaatacagaattttcacattctgacactacgaatttggatatagcacaggatcgtactatgaatatgcacgatttgtagtacttaggatgttcacatctcatactaaattgatttattttactacgaataaagtatgtatgggccgataaattaatcttgagtgcttattcactttgttgccaattttaatcttaccaaattttgatagcattagatacatttgtttgatgctattttaaaattacatatcgtttttaggagagaaaagattctaaactatcaaattttagtatgatagtactggtaagaaagggtttaatatgttatcctacaacaagatttggggcctgttcactttgttgtcattttcatccataccatttttaagtaaagttgccaaaaaaaatatctacgtttagtttgttgccaaatttagtcaatacataagaaatctttctaaaattttggcattgccaaaacttgataagttttttttcttttttgctataatctggacaggcccttggtaggattagaagtgataataaagtgaacatgcccttatctactgaattcaatgtcaacgacttttaaagttgaaaggctatccttctgttaaagaaaaaacaaacctataacaatgtctaatatatcatagtataacaaatataaatttattatgttatgatatatcacatgcagcttcaatttttttttttggggaacgtagggagcagagacgatcgatcctggttgcgggcggcgggcgaggaggcctccacgagcggccgggcggatgcgtctcggccgaactcgcgcgcggcagaatgcgggggcagatgcgtgcatatgtcgtctggggttgtcgttgcgtctctgtccatcgtcgtccacggttttgttctcgtgtatatggtgtactactagtatcgaaagtagctcgcgtgatcgtcgtcgtctcgtctggaagagtcggaggcacgtttgtttctcgaacctcgcaaccctccgcctctgcgtgctgtccgtatgtggaaatggaatagtggattcatgcatgactactcatcatcctagcttgtactgggtgggcacatgttaattttcccccatcgctaactcttaccacttgtttttgctccatgacactgttccttccgtcctaaaatataacaatttagtacctaggatttattctaaaatataatatttttttcaccaatatttctcacctaaccaatcatcactacaccatttactttttccacatacctccacttttcaaccaatcacgacatctctctatttaaatcttaactattttcttaataactatgtttaactttaaaacttgttatgtcttgtgtagaggtagtatttatagttcagttaagggtttctcctagtaaaaaaaaagcttacatatcatatcacgcacaatgtttaagctttaggacaatgtttggtctccgtactaattttgtcatgccaaacatatcgtgtcacatatagcacgttatcaacaaatacacttttgcaagcaacctcatcatacgtgtctatccgattatttgttgctaccttcttatttaccgttaagaagtgggcttggaattagcaaatttcttatttaccgttaacacactcgctaaagtactggagtagatattatgttacatgcagaaactttatatataaaatctttttaagaaatataatcaaatcgatccagttattcgtatgctaataatccgtcccgttttcttttgctagaaaaaggctctgtctcatcatctttttcaaacgcagccgaaatctgtctcctctggatcctagccaaaacagtgaacacagagtgagctccatgcctccactggccattcttttccatgattaccaactaccaagactctacaccaacaatgcagccgaatgatcctttcttatatataagaaacggcatatttgcaaataaaaaaaataattttgtgaataaaaattgtatatgcgtgttgttagcgacctaaaagctagcaaaggctgaaaaataaatttcgatgaaaaaaataatttaaaatcaactctaaatttaatgttgaaaattcaaattttaactaataaacataagtataagcggaaagatgaggccggtgcaaatagaacagggaaaagaaaaggtgcaatgctttatccggtgttgtacctgtcaaaaccacttgtttgtctcacggttttcttggctggtgtggcttataatttgcagtgtttgaaccccactgggtgtgacaagttgaatggcgccaattagcacgcgcggctggttaattattgggaggttgacattaggtttggttggtgctaggcgacgtcatttctgcagcgtcatggccaaattaatttgagtgcattatgaatgctttgcccccgaataattataattaagagtagatgaactggttagttttttaaaaaaaaggaatggacgagctgtatgtacactcacattttcaatttcattgctaagattagaatggaatggatggtccactgctatgtggaaagtgtggttagctgctaaatatgtaattatggtatgttgagatgttagatagccttaataatatcatcgcaaaaaaaagatagccttaataatataaaaacgaacgtaatattttctttctaagctatctgggttaaaggacatgaacatcaccacacggcatatacaatatttgatgatgcagaggaagagagagaaggatagtatgaaccgtttttttttataatttagttattgtagaaaacttatttcaaaactagtacatgccaaaaactatatccagaaataagccgtcgattcagcgccaaagacaatggcgctgagctataacatctcaacgccaccgaatttggcgtcgagatcattgctgagctggccggtattccacgtgggctggcccctaatacaagctagttaatataaaagtaacatcaaatttattatgtgaatgtaatctggtggtgtgatgctcagacttgtgtgtagcacatgattggttcgaatccttggcatagcaacatttttttttcattaattttgttcattgaccgatgttttctttcagtttggtgcataatagggtgattagtaccgtatatatatatatatatatttttcaaaaacagatatcatcattaatcatttatatgcatgcacgtagattgaagatttgaagaaaaaaaggaacggaaatggctgacctgatgggggattcgaaccgtggttgtagggtactagagcaaaaggacttaccattgcaccatcagtacattgctaattaagaagcgcaataatctaattagcgtgtaaaagggatcagcgccaaacgctgaggtcctgccacctcacggctcggccgccacgctggcacgatgttagcgctagtcccgttggcgctgacaggaacaacctcagcaccaatcactttggcgctgagccgacgatctatttctagatatagtttttggtagggactagttttgaaataagtttttttacaaggaccaagttgtaaaaataacggtggtctgaatgtctgatagacatcttaataccatatacatatcttctatacacaatctatataactaaatcactaattatgctataaacaacacaatatgagttatttgtgtatcgacaagaaaagatcatgggttggtttggtttaagccaaaacatgccatatcaaaatattgatattttaaatagtaattttgaaaatgtttggcaaataccatacaaatagtatcaaaatgttggcattagcatgctcatgatttgatattgtcaatattttaacatggttgcaaatcaaacaagtcctatacaccataacagcagtgacgtgaacagtttttcatgtcattgctatgtaaattgtcaagagaatggcatggctatttgtctcccaacaaccctataattctctccctcacgagggaaaaaacaaggaaaaggagattcatgcgttttttaagcaaaaaaaaaaaaaggagattcatgcgttgatagtattcgtattttgtcaaattttcggttcaattcggaacagtttcctggtaaattccgccgcgcctaccgcacatcatccattcccccatgacgtcagccaccggccggctttgccggagtagaccccctccctcgccgaccactcgaaaaagagagagaaaaaaaaactcgtcaaaaaagtctcgctcggagacgcctctcgtgtgccccgcctcgtctccttctcccgtcgctttctctctcgccgacgacgaggtggcggtgggcgctcgacgccgcgtcgccgtcgcggacacttgtcgccgccgcccgcgccaggtgtcccgtcggtcggcagcgccgcgcgtgcctccacctgtcgtaaccccagcgagcgagccaaaccaacaccctgcgccgccgtcgctgtcaggtgcccagccgcgcgccgcgtgcgcgacgccgcgcagcggaggcagcattcgagacggcgcgcggcgcgcgcgggcgatgtgcgcagcaaacgctggagtttgcacggttttcgtggcgaattcatgtccaattcctccgcgatgatggggggaaatttcgaaccacgcgtgagattttttatctgaaaggaagagaggttttttgtggtcttggcttcctgtcttcctgttgtgatgcatgtgctgacctaacagagttttaaggcctgggttacttccaaactttttcttcaaactttcaatttgttcgtcacattaaaaatttcctacacacacaaacttctaacttttccatcacaccgttccaatttcaactaaactttcaattttgacatgaaccaaacttctactcctaacattcttttgtttcgttacagtcaactgcagacttgcagagaggttggtttgcttcttcagagctccatctcaaatcttaccgagaagtttccaccgagatctgtatagaaaagggaaatccatctctgatcgaattcagatgtgcccgtcagacccagatacgcggatactagcacatgtgaaaaattcaagtcagcgagcaatgttcacttcattccccacttgagtactggagtagtaacgcatatgaacgctcagacaacaaaatctattatattatcaaaacaaagtcttactatctcctagtacttccaaaagtcaagctccatagacaacaccaggttaggtaattaggttgatgaacgatgaaatagatggaaaaagaaaaaagctagtatgcaaacacagtgatccacgagaacggtagataagcatataaaagagcgagcagcttaccgctttcttacattctctcttgttagttaggttattatgttgcatgatgcagtgggtcaccagaagacgatgcccaggttgatcatgtagttacatatatgtaggtatataaggtagaaagtacatgtaaagcagtgccctgctgggcagcttcaaggaaggtgaaggtcacacctcatgctcctgtcaaagctcaggagcagaaagagttcttccttcaatgtgtgatgatctcaatttgtatgaacaaattttcccccttattcagtagcaaaaggagccttcagcagatcataactcaacaactaactagatcccgggaatgcccactgcaaagacatgagaaagccaacgtcaaaacatagatatttaattttaggaattgtgagatcaacatcaagatgcacaaatcagttctagctatccaacacatcaagaagattgatctaactttaacgagcacataacaaaccttcaaatataattccagatttgagatctagaaataaggataagggaaagagggaatgtacattcatataaaaggaattgaatcaccaaaggaaaatattaaagaacgtgaaaatgggaaatccagatttaatccaccagacaatcttaaaatcataggaattccttttcagcttgggaatctaggacccaatagctgctttaaaacacagggaataatttttgtagcaactcttggaaaaataattacatactagtatgatgacaaatgatacctctttgagatatcaatctcgaacatgaatctaagatggagaatctaaattatttgatggagcttaaataacatgaatccgtgatactttcgcatgctcccatgccaatagtttccagtagagttccacaaataactgaatatctagtaaatactgattatattgatgaaacattcatggcggcctataagaataaacaactgaaaggcagaggccactgcccggcgaacatgaattgcctagttggtgcttgctaagttgatatggtacagtaactacagtttaattgccataatatcctctgtgtgagctcagtgctgtacaacaagaaaatgaagaactttatgctataaactttctaagtataaagttgatccagaaatcatataagtgaagagctagtagtaagcagagatacctgtgtctcatcatgggcgcttgatgatctgatgagtactactcttttttatttcttccattcatatttaggagaaacattgcggtcaagacttttcaactcttatcctgaaggcaaaataccatctttcacttcgggggaaaagttagcacctacccaaccaataaccccatgcttcaacagtatctctacagtcagccatgccaataatgatggctggtatggaaaatagacagaagaatttaatcgagtgatagacttttcttcattgtctcataaacaagatatgttatacttgcagctggaaccactttgagaagatttggtacaagccctttgtagaatccggaaattccctcatgctgcagtgttttccagaaaacatcagacatccctctatatgcagcctctgaattggctcgttgagcttgcagtctagaagtataatacagtaaacaaggtcagaagaggtgtccctcttaccaatatggatttctattgacaagctactgcgcaccttgttctgatgacttgcaaagggtaaacacatgttgctcctagagctcctgagactgtcccacaacctagttggactaaaggaccaggatctgcataaaagattatactttagcgaaatcaattgaaaattgagaggactgtgatgtaaacagaattttttgcacggagtttaccgctatccttgaggacatatgtcttggacatttctttcagtgtttcataaacagtaagatcaattccagcatacggaaccataccaagcaatgatggaacgaggcctctgtaaaatgctcgaggaccttcctgcatccaaatgtctcttgatagtgcaccaaggctaggaattttaccactaccacatgcaaaagtctgcagtcgagtctttactaaatctatgggataaattgctgtctgtgccactgctccagccaaaccaccagccatcagacgtccagaagtaccaatgtcgctcttattttctcctttacttttcattatgtattcttttagcatttcgtaggcataaaatcttattgcactttctggagcaacctttaccacatttaatccatttcctctgaagaaaccacgcagactgccctctctccatatatccttcactgcttgtaatactgtaatacggtttgtttgtacttgcatgatgactttgagacggtcaagaggtgcagtagcagtacgggatgttgcaccagaaacacctcctgcaattagatatttgcttgcgcttgcatgtttacttattcgttctggtatagcagcctgctcgcctatatctacaaggcagactctttcccaatgatggtagatgttctcaatggttgcctcatgagggtaaagcaaaagaaagtccctccattcttcaaaagtaataattccattattatccttatccacatgctcaacaaatcttgcaagctcctcgtcatcaatttctatgcctgcaaacagcaaactgatattacttgtaagacatcaaaaggactacaattatcaggtgctttcctaggacatagtgatttaataatagggaaaaaaacctgctagttttcacttttaaggttggaacttaaaccaccgaatttgggacattgcaatatgaatactaagcagcagatttttcaatttgacttgttatcgggtaagaaattatgaaaaaaagaaatcaaattcattccatcagcagacagccataattattacactgcaattgctatgggtggatcctagtagtactacgctttcttttcttcttgatctagtgctggtagccctgttagaaaccagaaagaagagacttgatgtatatgtccggcggtgggcaagctcagctcaatcaactgagatggattctttttctctctatcttgcttcatggtgttcaagcacgcccataaatttgtgattaacagaaaggaacaggctcaatagctttggctgtgaaatgctcatactcatccctaaaatattttattaccatcgacagtttaaaggcagaaaggagttcaggttattcaaacaaaatgagatcagcagaacaacccaataaatcatgatgaccagaaattagttaacaaggcatatttagttgctgtttcatgagaaataagttgaaaagttgaagtcggatgtatcctgtttttgcaagacatcctcatgaaatgtatcatcaaatccatttgtccatttcatatacaagtgcagatgaactgaaatgatatattctttccttgctcttgagttttttttttctgctcaatattatccttatatgatgtcaacttgtcaaggcaatttctcggaggtcaaaacttgggttctccaactgaactaggaggtttggatctaaggttccagagaagttcataggttgtaactcgagcaggaatgtccctgcctcccctggtttcacccctggtacgcacaattcggtcaaattttccatggccttgaggccttcgcctccactcttaactgcattttgcatttcgcatgaccgaagcatcaaagcacgtctaaaactccccggagaaggtatctactactaatatgcaacataacagccatccgctgtacctattccattcatgaagcatgcattgcatacgcttcgacttccatgggacccaatgtagcttccagtgctagcaacatgcgaaggtgaactagaaagcaaagttgcacaactaaattacctcagaaaatcacaaagcctaggcttactgcatgtcaatttgtcaataccgcgtgccacatttgctcgagcaactcccatcatgattaaatttggacaccattttttttggattttttcctagatacaactaatggtctcatggtgtcacgtgaagcacatttagcatcgcattaggatttatgaggaggatggatggatggagcagcagcagaagaagaactaagaagtattctagttagttaccagccttgacgagggcgtgccagagctcctcggggaggatgcagccgttgtgctcgacgtcgatggcctggaagatgcggtagagctccagctccttgtcgtccatgtacctgcggaagtcgtcgtagccgacgcggccgtcgcggtcgcggtcgcacgcgcggagcagctcgcgggcgtagccgccgccgccctcctcgggcggcggcggcggcgggaggtggagcgcggcgaggccggcctcgatctgcgcgtggtcgaggtggccccgccccgcggcgtcgaagaagccgaacatggcgcggatccgcgcctccctctccgcctccgtctcgtgcagcgccagcagcacgtgctccatcgtcgccgccggcttcctcgccgccccgcaccctccccctccccccgccaccgccacctccgctgctgctgcggatgggcgggggggctccgccgcatgggtcgccaccgcgccggacatggcggccgcgacggcgagggttttggggcgggtgatcggtgagggcgatgcgagggtgaagcggaggtggtgtcggaagggaatattctgtcacgatggcgatgctgttgctgatgagctcttgagctgcttgctcatcaaaaggagaagagcctctctctccctgcaacgctactactactatgctctatgcatatgcctgccacgctcacatgtggtgtggttgctttagttgaaaaggtttgttgtgaacggatctttctgcggatttttctattcaattgtaatgtaaggaaaaaaaaataaatgtttcgatataaacttactccatccatcccagaatataagaagttttagagttggacattgttattaagaaagtaggtagaagtgagtggtggagggttatgattggatgggtagtggaggtaggtggaaaaagtgaatagtggagggttgtgattggttgggaagagaatgttggtggagaagttgatatattttgggacaaattctaaaggctaaaagttgttatattttgggacggaggaaataacaaatacatcatccatcctataaaaaaaccaatatggcatatgacacatcctaatactatgaaatgtttatattcgtagtagtagaatacttatgaaaacgaaggaagtatctagatagtgcagtataagattttgttttataaaaaatgtatttttcttgaagagcaaataaataatatgttttaaatctaccaaataatttgaaaagaatatttgtttctaaatatttaacgtcagtaacttttcgaactttttttttgtctcattaaaaagtttatgcaaatataagaaatataaaccatgtttaaaataccacaaaacaagtcacaacaacacaaatgataacaaatggagtatatttttcaggggcttattgggcaatacagtacatgcagttattctttctttttctgaaataacatcttttaagctaaaaataacgactctaagatgagtaattcttgacctaatatacgaaagcaacactatattatgtaatgtaatatataatggaacagtttagtatataatgaaaagaaagggatcgaattaagcccaagaagaatcaagcaaagtagtgttatcttactggcaacttacttttcgatttgaaggaatgcataaacattcatagcacattcccccttttatgaatatgcctctttaaacatatgctcaaattgacgcagactaaatataacctctcaaattatactaaatgcactttttaagtatatacaaatatagtacacataattgatatacctcaatgagtacaatcacatacacaaaaattaaaccttcagtcaccatcaatatatcaattcaaactgatcaagtcaaaaagggcatgaaaatgccgggcttccaatggcacttcaaagtctagaacaaggaaatgtcaaagtatggagaagtctagtgcttaggctaaaggatatttagaagaattaatggatggtctctaggagggggcaaagggatcagagtggagaacaactgaattagcaagggaattaaaggttagcaacaagtgggaggaggatcagatcatgtccaagaagaataatactccctccgtttcgttttatttgacaccgttgactttttagcatatgtttgaccgctcgtcttattcaaaaacttttgtgaaatatgtaaaactatacgtatgcataaaagtatatttaacaatgaatcaaatgataggaaaagaattgataattatttaaattttttaaataagacgaacggttaaacatgtgctaaaaagtcaacggtgtcaaataaaacgaaatgaagggagtatcacacaacattttgtttccaaagaagaccagaccagaggagaatggaatgttctaggtgtgttactgtattattcttctcttcaggcttctggagatcaccagcttgtcctttagcaatagcaaacctcttttgggctgtcatgtgtgcgatccacctgtatgtgaaccatgttaaatttggtgaacttatcttaaatacgattaactctggagaggcccacttgtaggtttaggtccattttaggggagtttaaaatgggagcaataagcaacttgtgagtagctagctagtgagaatatgccatgtgtaggaaagtttttagcagctagtaagtttcttctagaatcttcagcttccaaaacagtttagatttttacccagattctgagtgtctataattataattatagaattcagaaaatgaattaaaagtcagaaggtgggaaacctattttttagaaggtaataacttctaaccaactatttctcacaatattaacatctccaaacaggatgttaaatgctaggtatccctgcttccagttaatagtttatttttctggattttacaatcatatattctcataatatagacgggaatttggactgtttagaggagttgaggattttacaatcatatattctcataatataaacagggccttgacatgtaggacccacctgtcagctccgaatgtcctgagacgcacaaaaagcttggcaagcacaacacaagcgtcaaacaaaatggcaagctgcacatcagaaagcccgtatggaaattctattgcccagtgtattaattatggatcagaaactcgggataaaaatacgtagaatttgggccctagcctttcaagcaatgagcgtactgttagagcccacaagcagtggattcgtcctctcatacagttggaataagttcactttgggtccctctatttgtcgcccagtccgattttcgtccctctaccacaaaaccgggtacgacatgtcccccaacctccgaaaaccgggcaaacaaggtccttcggtggttttgaaggtggttttggctgacgtggcgtctatgtggcttgtttgactagttctccgtctcacgtggcattgacgtggcgctgacgtggcaattatatattggaaaaataataaaaatcgtgggcccacatgtcagccacagaaaaaataatttaaaaatggtgagtcccacatgtcagctaaaaaaataaatatggtggggcccacgtgggccccacatgtcattctcaaatgaccaaatccaatcctcttcttcttcctctctccggctctccccatctctccaccctcctctcgccaggcggtgtccagcatggtgagcggcggcgaactgcggcagcggcgggcggcgcggcgacggacagcgcatggccggcggcgggcgacggcgcgcgaggcgtgtggggtggtggcggccatctctctcttgcaccgctcgtctagccgtccgccgcccttctccccgatggtgaggcctacgccgttcgccacgctctcggcctccacgtgcccggtggcgatggcctgcttcgccgcctccaccgccgtgtccccgccctcgccgtttggagatgaaaaggcccatgatcttgatactgacctactactacatccgcggcagcaagctactccagccagcaacactagcaggctgcaacagccattgacttcgagttgctacggacaaacgagcgagccagacatcacctcggcaccaaacaataatgcaccccgatggatagcaacggatacgattcgatgacgtgcaataatggcggcagcgacgtcccgccgtgtcgtcaggtcgccgccggcgaccagacgatgtccttgagcgccggccagagctcttcgctgcagaacgatcggtactccatggcgtcgccgccatccttcttgacgtccaccacgagcaacgacggcgccacgctgaagacgtcgatcagtcgccacggcgagccgcaccccgcgcgcgctgctcctcgtcacgcgcgtgggcatggcgccgcccgtcgcgagcgcctccagccgcgcgaccacgccgcttgccgcctcccgtgttgcgaaccacgtgccacccgcgcgcgccgtggctcgccccgacgacgcggcggggtcatgctcgaacagcggcgacaggtcgaagcactcggacagggagatcaggtggaaccacgtgcagacctcgggtggcattgccatgcgtgtctaccggcgctggcacgagatcggcgatgatggggcgcaggacaggcgccgtcttctggaaccacggcgtctcgaggaggccggggacggtgatgcgggtgcccgggttggggtcgagcagcatcttgatgagcttctgccgtagcgctggctgccggacctccccagatctgccttcacgcggaccggtggcgctcctgtcaggaggcggcgccgaccacgccctccgccaccgccggaactcgcctgctccgctgcccacccgcgccgtccactgcccgggaaggggagagagagaggggaaagggaagaagagagagaagggagagggaagaagagaggagtgtggctgacatgtggggcccacgtgggccccaccattttaaaattatttttttgtacagctgacatgtggggtcacgctttttattatttttccaaggtataatttccatgtaagtgccacgtccatgccacgtgggatgaagacctagtcaaacaagttacgtagatgccacgtcagctaaaaccgccttcaaaaccaccgagggaccacgtttaaccggttttcgtaagttgggggatgggtcataccctgttttgcggtcaagggacaaaaatcggactggacgacaaatagaaagacctaaagtgaacttattcccatacagtttgaggctgtgtttggcgctttttaaggccttgttcagaaaagcccagtcctgaggatgggctagtaatgattttttttatttttttaaattctaattattaaaatatttagagaaaaatattttctatttgaaaaatttacaaaactagtcgcccatcaccctcacagagtgcgattttgccgatgtggcagaaggccgttggccctcccataacagccggccaccaagaacgctaaaatccaccaagagcgctgaaatgttgcaagcggctcccttaccgccctcctagagggtggtttttggctctagagggccgcttgcaaaaggcggtccccattgccgttctttgggagagcgattttctattttgcgggagggagtggcatcttttgcaagcggcccccttgccactctctgggaggacgattttcgactatgttgggggggggactgcaaaaataccaggccgcccttttgcaggcagcacagtaaaaatcgttctctcatagagcggcaagggggccacatgcaaattttccctcggtggctggcctttaggggagggcccacggccgtctgtcacatcagcaaaatcgctctctgggaggacgatttttaaaatcgcctctcaaaaagcgatgggcgactagttttataacttttttcaaatagaaaattatttttgtaaatataatttacttcagtttcccggcatccacaggatacgtgatggtgttaagggttggttgatccattagtaaacactaaaaccttgtcaatttctttggtaattggtagtagtaatagctaaatttgtccatgcctaaatattggcaaagttgcctttcgttttgttgacaccttttcttttttctaaatattggccaagcttaaatttatgaagatataaagtggatgctaaatatttttgacttcaaagtaagtaatgtcattcttttacccgtcgacaacaagagcatatgtggtgactttgtcacctcaagatacgccgatttagttttcagagatgctcatattaggtaatgcatctgtttataaggatgagtgcacgtgtgtgtatacgaacagttatttttatattgtgttccgaaataatagtgccaaaatttccaacgtctttaattatttagcatggttgagtttgactatggcactactggttagaggacggcacgagtcgtgacggacgggggttaaaatggagacatcggagtaaagatgtaaactggttagattgctcgatccttgatatgatctgattgacaagaaaatcgacaaagacgggagacgactagtccctgtgcatgagaaactatccagaaagacggccggaacatttatagtacgtatatacagtgctacctccatattttaatatatgacgctgttgactttttgtctaatgtttgactattcgtcttattaaaaaaaattatttaattattatttattttattatgacttgattcgttatcaaatattctttaagcatgacataaatattttcatatttacataaaaaatttgaataaaacaaatggttaaatgtttatcgaaaagtcaacggcgtcatatattaaaataaaaatacggaggaagtactaattaagccaagactctatgtacaatactaccttcgttccaaaattacttttacttttatatgtgaatctggataagtgattagttatactcgtgtgtaaaagtaaaaaacttgttctgattcatgtgtaatatatagctgaagagacagatgctgttgacgaattcttcatcatcaaattacaatcctattgaaaatgcatttgcgtgtacatgactatatatagtgtttattttgtaaaacaccagtaagagaaattaattttaagtactccctccattccataatataagacacaaaccatttttcttaaatgttccataatataagacgtgcatgcaagcatacaattaactatgacatcttctctattaaattataatttaaatcatctactctcatgttatctaatcttattagaatgatctaaactaatacaagataatataataattattttttgatctttaggttaaggatgtttgtgttttatattttggaatggatggagtacctattttgtattttccaaacaagtacttattaacgacgtacacatgccgacaaatcacgtcgacaatacaggctgcctacaaccatgacgtacgttaaccgagatttaacgcatatacgtacccctacatcctacccctccgttctaaaaaaaagtctaatcctagctacgaacctggacacatacgtgtccagcttcatagtcagggtttggcttttttttagactaatacattaattacttaattgattatcactcctactcataggttgaaagcgatatgtagagagagacatggactagacgaaacgcaagggcaaattaataccactatagctcgctcgatgtactagtgattaatgcttggctaattaagctagctagatctccaagttgattaattacatatatatctcagctgatatatacgtacgtacagcgcatagatcaaccaccgatggatcgaggagacagcagtattaatcgtgtacgtacgtacattgggtgcctgcaggcttaggccgtaacagcctaattgatcttgtcttcatgtacacccattttgatgatctgcatcaaattaaacctattccctctgtaaacatttctactttgagaaatatctactactcctattcatttgatctgcatcaaattaaacctattccatctgtaaacatcaaagtagtagatattgaagttaaagggtaaaaaatactttgatgcccctcgttagatgtagaatgaatagatgcaagaggataagtgatactactccctccatatatttttgatagtcatatttccaaatctaaaaaatttatttttgatagacatatttcaattcaacaacctatcatattaatgattttcttggatttaatgcatgactctccattcttccacacaagattggctatatgggcattgagaaatgtaaacattaatgaatcgtttatttacgaggaataactagtagcatatttaaatggatgataagtagaattacttattcttggtctatgtgccaagataaaatatgactatcaaaagtagatggagagagtattaagatgggaagaaatttagatgagaaataatatattatggaagaatatttggacaacaacgctatcattaagtgcatgcatgcacaaataagatatattctgataaagacttttagttaatatatactatattctcgctttcataattcttaatgttttggataaaatcgagttcaaacttttataactttgattataaataactttcaaaatatttagtttaaatgcactagaataacatatatagatttatcttacaaaataatataataacagcaataatgtatgtgtgtgtattataatagtaaaacatagttaaagatatattttgaagatcaagtcattatctaaaacgtcaagaattataaacctagagggagtatcacttagagactactctcttacaatatttgagacaaacatcttgttttatcaagaacatatagatgattttatatattgcggtccaaacttacatgttttttaaaaatatatcataaatataggaggaaaatatataatagaagtatagaaattgatcaaactgcatagtgataataagagttttttttttctcctctcaagattttttttctttctttaacatggcctatttttttttcctcaggaccatgaagccaccatctagattgatacgccaccaagcttttaaaaattgtaacaacgttataatattttaaaactattctaaagacgagcctaaccatatcactttcaaaagctgaatatttgaaaagaaattgatgaacagagcttaaacatattggctgcacgtattctaaactttacttatttgtcactgaagggagtataacttactactatctattactctccccgtctctcgatatttgacaccgttaatttttttaggcatgtttgactgttcatcttattaaaaaaatttaagtaattattaattcttttttatcatttgattcattattaaatatacttttatgctacatatagtttaacatatctcacacaagtttttgaataagacgaatggttaaatatgtttaaaaatattaacggcgttaaatatttagagacgggggagtgtatacgtgcttggctacgtacttaatttctcctccgactgcagcgtacgtagtgccgatcgatcgatcgaattaagttaattaagtggatcggtcctccatgtacgcatgaccgaggctagcttaggtcactatcgctttaaacactccgatcgatcaaccataataaataacgctccttaattgattgttgcatgtgtgtagaactagaatccaaacggaggatcgacacaagtactacgcgagtatatcggtacgtacgtacgtcgcttgacacgtgcactgtcacgatatatggcacgtcaggtgcacggtcgttttcatattgcattggtcacgagccagacacatgcgcgcgtccatctgcatccatccatccatccatcgattcatcaatcgatatcggcatgacctgacgctgactgcataccatgcaagagctctctatggagacccggtccgcaattccgatatgttcttaatttcggtgtgtttagaagagtttaagattctaataagtaatgggttagtaataagtttctaagaatatggagaaatagtttctcagtttttgacttttagtttattttctggattctacaactataacttcttagaatctaaactaaaagtagcttctaattatgagagaagctgcaacaattaaaaactcctctgaatagatctccattaggatttaccaaactattcgtgagccaaaaatcagaggctaatggttttctttggttttcacgaaaaactctggtagaatcaggttaaattttgtcaagaataaaattttgtttgattttttaaaaatatttgataggtaaacgaagcgatttgagttctcgaagtccggttttatatatgtataaacctcttcattgtgtcgtcgtcttcctctcgatcggtctctcttatcctgttgagctagcaatcaacgccgtcgatggaatcgaggaacttataaacgtagccgccgcagagtgcagtagctcatagcctcatacagtacatattttggttgttgcattggatgcttcatgccggctgcaatctggagctgaacgtagagggcaagtagtctagctcggacacgtactctcgcaggatatatgctatcacttgtggaggtggagaaaggggctttactcctggttcgtaaccccctaccaatccaggactaaatatcactatctttagttccgggtgaaaaaaccaggagtaaaaacccatttttagtcccggttggtgaaagataaagccttttttagtcccgggactaaagatagagctaggctatctagatccggttgttttattattattttcttttcttcattgtttttaatatattgatttcaccccatccccatcccaaaatcccaaataaattagagttaatttcactttgggccatgttttattgccaaagtttcacttcggactaccttttgtctaatcttttcactttggactaggtatctttacctttgttgcacaataaaccaccccaaactacattttcagttcttcgatgacttcgagcaaactgttaacgacatgccaacaaattttcatacctaaatgcttgccatacctttattaaaagagacgctagacatcactaatgtaaagagttagggtggtccattatacaacaaaggcaaagttacctagtccaaagtgaaaagatagtgtaaagggtggtccgaagtgaaactttagtaataaaacatggcccaaagtgtaattcactcaataaattatccccaaatcctcaaatcctcaactccccaaatcgatacatcacagatacatcacaaattttacaaaattcatcatagatacatcacattcacatcacacacaaatcaaatacacaaatccgaatcacaaattctaaaaagaagaaaaaaaaaagctcgttgccgctgccgcgccggccgccgcgaggccacccggccctccgccgcgccgcccgccaccgcgccgcccagcgccgcaccgcccccagccaccgcgccgtccgcgaggccgcccgggccaccgcgccgccgcaccgcccagccaccgcaccgccgcaccgcccagcgccgcgccgcccgcgaggccgcccgggcctccgcgccgccacgccggcacgccgccggccactaggcccgtcggcgctcgtagaggagaaagagaaaaatgaggagaggagttaaaggagagaagttaaaaggagaggaggaagaggaagagatatggaggaggaagagataaggccagggaggagataggatatattaactgctcctcctcctcgatttggcctcgtactctctgccgcccatattgcgcatgccgatcttttattccggttggtgttaccaaccgggactataaatagatctttagtcctggttggtaacaccaaccgggactaaagataatagggatcttttattccggttggtgttaaccgggactaaaaatagatcatttgttccggttggtaatactaactgggattaaagataaaaaaaactctaaccttttgaaccgggactaaagatatctttagtcccgatttttattgtaaccgggactattgtgtattttggccgaccgattaaagatggtttctccaccagtgtatgtcattcccaagatggtttaagatcaaattaacttactttaaaattatcattaatactttttatgtactttggattggaggtatggaaatcatagattcaagatttgtcttcaacatagggaagcactggtaatatggtggtggagtcgtgggtgcgtgacttcattcactagggttcaaatcatgatgcccacgaatattacgcacatacaggtggattttaatagggcttcagtgagattagctagagatgtactaccgccggtttccgtctcttagagcatccggggtgtgagtgtgcgtgagtgtgcgtgtgcatttgctgtgcaatctaactattataaaaaaaatatattgcttcgtttacttttcttggtttataaagcggcagctcaaccaacgagggaaacaagtgtttgcgaccatctgagagaggatatacctaattatctacttcctctgtttcataatgtaagtcattttaagatttttcatatttatatcgatgttaatgaatagacatataaatgtgaaaaatgctagaatgagttatattgtgaaacggagagagtatagaacaattaattatttccgtctatctctcgtcaatcaagaaatggacggcagctagcaatcgaactgtcatccgtcgttcgggaatggatcatacgttcatacgtcgattgatcgatcgataaatccaatgcaacgcagctacctcctctattccctctaaactactcctagctaactagtacatgtactctttttgtctataaaaacaaatataatatgagatgtggtaaaaattgtaatactatgaattcgaagtgagaatatatacctaaaaaaaatccaaaaagtgctaactctacgtatatatgctatacgctgggacaagcacatgaacggcatgctacgtgtctctatatacgtagtagcaaccgtgataaggtggaaaaatatacggtggaaactacctatcactggtggagaaaggggctttactcccagttaggaaccccccctataatcccggttatacaaccgggattacgaatccgggactaaaaatacccatctttagtcccgggtgaaataaccgggactaaaaatccaaccgggactaaagatggttgagccacgtgactgacgcaggcatctttagtcccggttgatcttaccaaccggcactaaagacttttttttcctccttcggttctttctcttttatttttttttcagttttttctttcgttcatatcgattcattcacagtaaacatattcattcacaacatcacaaatacattcacacagattcattcccaacatatacattcacaaaaccattcacataaacattcgcaaacacattcacaaatcaacattcagaaatcaacatccacaaatcatcaaaaaagaaaagaaaaaatcatccacagatctgggcccgggaggggtgcgaggccggcctccatcctaccgccccttgcccagccggcctcccatcccgccgccccgtgccgggccgccgctggccggactccattccgtcgccccgcgcccggccggtgccggccagcctctcatcccaccacctcgcgccgggccgccaccagccggcctccatcccaccgctgcttccgtcgccgcccgccggaggggaggggaggggaggggaggaggagaggatgagtgggggagaggagagaaggagaggatcctcggcacgtaagatggcgaggagaaggggatcagaggagatgagaagaatagatagggtgtgaggagaggaggagaggaggagatatttatctcgatacgagtcacgcgtacgcctcgatctctccgcgcatgccgatcttttttcccagttggtaacaccaaccgagactaaagatattagaggggtctgacatcacctatcattttttgaaccgggactaaaaatgatctttagtcccggttggtaacagatcaaaaagtagctctaaccttttcaaccgggactaaagataatctttagtcctggtttttattgcaaccgggactattgtggaatttggtcgaccgaccaaagatggtttctccaccagtgtacacagtagaaacatgaaaactattattggattgaaaagtagacgtctaaaattcattccgcaccttcacaagtaaaaaaaaattactcatgatgatgtgaacgaatgtcagactttcattttcaactcaacggtagtttaagatcaaacttactttaaaatgatcattaataacttttatgtactttggattggaggtatggaaatcatatatacaagatttgtcttcaaaatagggaagcactatagtagtagtatggtggtagagtcatgcagctcttgatgcccacgaatattacgcgcatataggtagacttcaatagggcttcagtgagattagctagggatgtgccactcgtttccgtctcttaaagcatccgaggtgtgagtgtgcgtgtccatctgttgtgtaatctaactatttaaaaataataatatactccctccgtcctaaaatataacttttagcccttagagcccttagagcaggtacaatagcaggctataagccagctataaacatattttaaagagataaaggaagagagaaaagagcagccagctgcagcacggattctaagacgtaatgtgtgtgacatataggaccagttattaatagtatagtaagcaactattgtatgaattggctattaaattggctattgatgttttggagctataatattaaactcgctcttaagatttgtcccaaaatataacaacttctccaccaacattctctttccaactaatcacaactctccaccattcacttttctcacctacctccactactcatccaatcataaccctccaccactcacttcaacctactttcttaataatcgtgtccgactctaaaacttcttacttaattaccaatagaacaattaattatttccgtctatctctagtcaatcaagaaatagacggcggctagcaatcgaactgtcatccgtcattcgggaatgaatcatacattcattcgtcgattgaacgatcgataaatccaatgcaacgcagctacctcctctattccctctaggctactactagctaactagtacatgtactcttttcattctataaaaacaaatatgatatgagatacgataaattctaatactaggaattcgaagagagaatatataccaaaaaatccaaaaagtgtgaactctatgtatgctatacgctgggacaagcacatgaacggcatgctacgtgtctctgtatacgtagcaaccgtgataaggagggaaaatatacgctggaaagtggaaactacccatgtagtagaaatatgataactattgttggattgaaaaataaacgtttgaaattcatccacgtcatcacaagtaaaataatttactcatgatgatatgaataaatcttcagactttcattttcgaccaacggtaatttctaggtttctactgtatatgtgatttgcatgtatattttcttgtgataagtaacgtagtatgtgtccttatatgtcttttatacacttagggctactttaaaacacatgattaaaaaccagatgaatagaaaaaatatacataattttgatgggaatacatatgtaaaacacatgaaacaaaactaataagagagagaaacaaagaatatatttttcacgagattatagcacttgctaactttttaccaacgtgtatacaatgttgtgcacaattatggacggtacactctgaacctagttctcccgacttatatatagtgaaccacaaaatcttgcactcactacaagaatccataattttcatggcgaccaactaatttctttggcggccaaaaaaaacagccggcgagtttaaatatatttttggcggtttcaagagttcataatcttcttaatttgcttagcagtccgaccaccaataagacatttccttatggttagtcgccaagaaatcttaatatcgttgactttctagacttagcagtgtttacttgacggtaggctaatggaataattaaccttgacggtttcttgaccgctaagaaaattatggattcttgtaatgtttgtaaacttcctaattaaccaagggcaagatacataattcaagacatgaccaaaatgcagggcaaattcgcttttgatctgcattatatttgaaatcaatacataatttggcatagatggatcaatacgtacggttccaaacatttcttcgacgacgaacgtttgtgatggcgtgcatgcacgagaacgggaaagcagtaattaattggagatctagttaataataagagtgattaaagagcgttttattgcgttgtccccatatttgtcctttcatcaactttagaacaaacatagcagagcaagtatggtactacagtactcaacggtagctagaaagctgctagtgggtactgtagtaccaacgcacagctgcacttatcctacttacttcccctttctatttccttcaccaaaccatatatatactttgatgttcagatcttagcacggccaacagactaataacggcaagaagttattttaggagtaattaagctaagagattaattcctaatgtaaagttgggaagcatccaaccactcgatcagcctcattgcttatgcttatcatccagaatttgaatttccaaccttaatttaagttgatttaaaaaaaaatttaccgtagtttatttttcagttttttgcttttagatcgttaagaacacgtatataaaagttgtattcacaaattatttttcatttgtaaatatgtcgtttcgttttttcctccgtcatctgaaacgatggggttggatgtccctcgatcaggttccaagctaatgaaatcagtttcctagcattagctactaggtttcattttgagtgccagcatgtagtagtatttttttttccaaagctacttggcagaccttttgcttaaaagacaagacattttaggtagctagctgctcataaaacctcctctaaaggatcccttggaatgtaaaaattttatagggtgttcaaggaatcttccttaaaaaatctttcatttaagggcttgtttggtttaaaggaaagtaaaggatttgatttcttaagaattaattcctatgagcttgattcaatttgtaggaatgaagtataggaaaacccaagaaaatttttctttcctacaagttgtagataataattaaacgtaggaaattttccattcactcaaatcttttaaaaaaattcctatgaagtgcatgcatttatattccttcatttttttgttctattcctatgggttaaaattcctccaaaccgaacaaaagccgaaagctaaatgtgacttatataatcctaaaacaaaacgttctcccaagcaccacccatttactctacatgtccgccctttcttacagcccccgcttcattgcaaactacagtaaccctctctatatatccaccaccctcctatgccacataagttctaacatcttgctttttaatctactactccctttgttccacattgtaaggtgttttagtttttttcaaagtaaaaaatataaattagaccaagtttttaggaaaataataaacacctatagtgccaaataaatacactatcaagatatatttcatggtcaatttttaataatctaatttgatgtaatatgtgttggtgtactttcctataagattggtcgaattaggacaaaactaaaacaccttaccctacaatggagggagtaatagtaacagttaaggagaagcatgatgcaagaaaaatgctgagactgaaattgtaaagcaaagagtgtacgccatatcaccatacgtagagttgcagagtacttgtgccgcagatggtgacaaatgtatcatcatgatcatagtcatcgattgacgaggtccacaccagttcatcagacacctggtatagcagaccagagagcaagatacaccggccggccagcttccgatatcccgctaaggtccagaattttgccgggaataattcatggaacgatcatgatcgataatatatttctatcttgcaaaaaaatatacaaaaaaaatgttagaaacaagataaagaaaaatgaaaaatggcacatgaacacaagacgtatctcaggtacagagaaaactagagataaaatcgcttgacaagcttcaaatgatcaagtgaggcctgtttagatcccacgtcaaattatttcaccatatcacatcgaacgtttgaacacctacatgaagaattaaatataggctaaaaataactaattgcacagattgtgactgaattgcgagacgaatattttaagcctaattgcaccatgatttgataatgtggtgctacagtaattcgtctcgcagtttactgacggattctgtaattagtttttttattagtgcccgaacacccatgtgacaccttatataatatctgatgtgacacgccaaaactttacagcaccccctgaatctaaacacccccttacattattactagtacatgatcatatttctgactctgtacttttgctttaagtggtttgcaggaggaaaagtactacagagtgtcagaagaagatatgagacagaagcttcttatccagtaagaactctggcacagatgtctgtggagccaaaacagtaaaaccaatgctgcactgtacatacctgttcctctcattaattaatcagtcgacaggggcaacgaacttccatcaatctgaatcacttttacagaacacatctgtagcagcaaaggacagttgattagtgaaatatgacgagccgccaattattgcaggcagactgttcagatacttcaatgttgatacggtgtacgaagtactcttgccatgaaatgggactgcaagcctgtaaatagatcaaaggtcatagtcaggaacacctcatatccgtagaaatacagaatccaggctggatcatgtccattacaaattacatactagaattttcggacttacataaaggagtgacatgcatacagagagcataattcctcaaatgtgcgaagagagcaaaaaaagaaacagaccacacctcaaacttattacagtttatacgttacacaaatacttcaatggcaaacaagatgcgtgaaacaacatgtagctgccaaacagaaaaggtaacaaatatgttgggatagccacaaaaaggtgaacttgcagactatacgaagcacaagaattcagttatttgatcaatgaaagattataggcacaaagagtagagtgttactctttgctcctacttcatcttcctgatgtctgctacttctgaataaaatatattatcatgttctgcacccagtaaggagttacttctaactgtatcatgaagaaatataaacgtgtcagaaaatattaaaaaatataaatgattcaccagctaagagcgtcgagcaacactcagcagtgagcacacaccatcatcataaccaggctgtgtacatggagctaccttagacaagcttaaatgccaaccaactccaagcagtcccagatcaaaaagctcatgacaacggaaaacttgaaaaagaaaaaaaaaactttacaagtcttaaccaaaaaaactctaaatttacacacacacacacacacacactaaaggcaacacattcttacacatttcaaactccagttctatagcgcaaaacaagacttgagtgttgaaatatgaagaaagtttcccaataagacgagagaaaactgaacacgtcatcacaaataaagcacgagatattcccaaacgcagtttgcagcataagtcttgccatatgagacgcctagttaagaacaacgtccatgcatccactggcactcaaagctcatgactggaccatatccacaccccaccatagctgtggaagaattatggccatggagttgatctgacacaaatgcacaattgctttgcagaacaactagcctagcttatactaatgctctaggagctaatgtgctaatgtgaatcaacccggggttgccccacaattaatgtggctaccatgggcgtaggtgagagtgttaattaccaatgtcctagcagagaaggtggttatgctaatacccgcacagttcaccgacagcccccactgcgggccttgtggactggaccaccttcaccttcagttgcccctcccctgaattctctcttcacctctactacctctgtcccgaaataactttatttttcacctatcccgtacataccaatacaaagacaaaaataccataatgtcctctattttaacaaatcacaatgcaattttaccccactttaacaaactccaatgcatttgtctcccacttccatagattcaatataatgatttacttaaaagataaaagttattttgagacaaataagatggtaaaaaatgaagttattttgggatagagggaagtatctccagtcctgccttacttttatcccttggcacacacctgctagttgctactgcttgtgaacccagcccttggtgatgttcagtgaaaactaggccaaacacaatctctttgattctctctttctatctctgtatctctgatacgtactatttgaccacctatacgtctcaccacatttaacgcggcactgtagacgcaagtacaggccgcagcagtttatattcactcaaacaagtgctttcctcctcccccacacctcctccgttcagttcagaggcgcctagcaatagcagctcattgcctcatctctgcctcccctgtccttctgggggcagagaatctctccactgctggaaaaatggtacagccaaagaagaagtttcgtggagtcaggcagcggcactggggctcctgggtctctgagatcagacaccccctcctgtaagctcttctatcaacatccctctaattttctgctaataatgttatgttttgatgtgtctaatactctaatctaataagtaataagtctcaatgcatatggtgtttgcaactaatgcagtaaaaggagggtgtggctgggcacctttgagacggccgaggaggctgcgcgagcctacgatgaggctgctgtgctgatgagtggccgcaacgccaagaccaacttccccgtgcagaggaactccaccggtgatctcgccacggccgcagaccaggacgcccgtagcaatggcggtagcaggaactcctccgcgggcaacctgtcacagattctcagtgctaagctccgcaagtgctgcaaggcgccatctccgtccttaacctgcctccgcctcgaccccgagaagtcccacattggcgtgtggcaaaagcgcgcaggggcccgtgctgactccaactgggtgatgacggtggagctcaacaaagaggtagaaccaactgaacctgcagctcagcccacatcaacagcaacagcttcgcaagtgacaatggatgatgaggaaaagattgcgctgcaaatgatcgaggagttgctgagcaggagcagtccagcttcaccctcacatggagagggagagggtagctttgtcatctgaaaggcttggatgaaacgacggcataacgaagtcaccactctagaccatggttccagaatttcctgctggtacacaggcagttcagattacttcagtacaatagaaaatatctattacttcagacaagtaacaagacatataagtttgcaactatgtgtagctatatgtgtttatgaaaagctatatatacgcagtctccatcaacatactttgttacacatcaatgtcagttatatagtttctcataaaggaaataaatagattgttattctgtgttagtgtccatcttttgttcagatgccaatgttggactctgtcaacaaatctcaagaatatgatgaaggtgatatttgtgaaaaagacccgctttaaacgacataatgattcaaaaggaccatggacttttttatataacaaaatatatatgagaagaaaacaccaattgcttttgtgtatttatgccagctatatatgcatttattgtgagaaaatacaattataaagcaaataagacaaaataaaagcagctaaagtgatataaatgaacacacagtccttccattgtctcaactagcatgtcactttttatcaaccagtaaatgagtaattctagcctttctaggctctatgaacttagataaatgaatgaaattcagtgaggacaattagatgcaaattagtttgctaaaagtaagtcatctatattcgatgcttgggtctctggtgataccattccatatgcatatcaagggcaacacattctgaatgacaatgtaccattctgcattaccataacagaaatgaggaaagatttcttttccgatacttctttatgccaatcttgtgtccatgtgttgatatataataacatgaccaacatcatgtaaccatcaaatgctaaactaagggtgtgaactatggactaaatgcatggaccatcaacagattatttgagtacaggtgtacagcaaacacctcaaaggcctttaagttgtatttcccctcattcaataaggaaatgcaacatgaatgatatccatgttaggctgccatcaagataatcgaaacatttgccttcagacaaggagcatctggtattagccttgaaatgataattatgacatagaccaaaagaaaagggcagctcaaggcctcaagctcatgtcatttatgtgctaaaaagacagacatctaagaagctgagtcagtgaaactagattacatactggttagtggttatcatccccattcagtactttggtagttaagagccattcggcaatcattggcaactacaagaaaatactgaaacgggtgaaccttaatattaatggtctgggattttcagttgggattctaactcaaacactagcaagtaaaagaaaagttcatatatactacatacgtatagatattgaaacagcaaacgataagtataaagatagacaatgagtaatgaagagcaaggtcccctacatttcttttctttccaagcttcagagcaagaacacatatgaacgacaaaagaaacaagtatcagcactgtaattgaggtttacaggttgggggagcatatcctatacacacaggccctcgcgtgtacacaccgtgtacaccaactaaaaattatcacaaaaaattctaggaaaattcatacatgtactttcaatagtattacatctatgtgcaaagtcgcatcttcaaattcattctacatagagaataaaaaaaagataaaattctgacaaaattgcaaccttaaaactgtcagattttttgttttttttgttacggctaaaatataatgaatttgacgttaagattttaaccctaggtgtaatacaattgaaagtatgtgtatgattttttctagattttttggtgatattttttagttggtgtgcacgtgtgtacacgtgagggcctgtgtgcataggatatgttgcctacaggttggtgcaaggcatgcagtcaatgcataagggcccaattcagttagttgatcaagcctaatgtacgactgtataaaaaaaacagaaataataaacatagaaggaaactagctgccaaccatagctgcttcacaacaagtactagtgaacaaatggcattacattcattgtacataacatgacaaaatagaatttgagtaaagacctatatgtctatgaaatatagcaaacttattgaatttggtttcttatattacttaggttgctccttttttatcatcacctctctataccaaatggaaactttttaacttgtgtctgactgactcttgtgctctcccatttacccttaatcataaatccatgttttataccggttctgtttgatgacctcatttcattcggtaggcagttatttatgcattgataattttcaaaagcttctataattactgccactgtttcaaatctcagacatatttgttgcaacaaccaaaatttgtaaacctatttcttcagccagtgcaggtaacattatttgccttatttctaagtcattgttctatgctctgactagcagtgtattgtctatgcataattctagcatcaagatttagaagtgagatgaacacccaaaattttccactaatctgcggtcaatattttttctggtaccacattagctggtcaatgaacttccatattgcgaaaggatgcaataaatttgtctcgcctaatagctgttatggacttctggtccccaacattaactccatcctttgcttcaatcctattcaaatcaatcagtgatatcatcttaattaagatagtaaagcatacagtgttaagttacttgctctgtagcagtgataatagttatataatggatctacctgaaaagattcaaataagctgacaaatcaaatcacatttaaaataaatcatgttctagttgaagtatgctagaatacagtttgcagcaccagcaggtattgaattaattgacagaatatgttataagttgtaatggctgtaaagaatcatattaaaagaaatactgtgcacagccttggtaaattagaaaaaaaagcacctgacagcagttcccaagtccacaagaccacaacccatcagaccaggctccccaaatcatgaacttggtgtaaaggagcaaagagaaagctatgcaaagcctgcaaccaagccaatgttgtcaatgcagcacaactgtggcatagatagatgacagcagtgtggaactgtggattctcatgacaggttaagtagtaatcagagtgattagcagggagaagggtggaggctgcagggtggtggtcagatgaagttaggcaggtgcaaaccatgtggtagtggtgcatacaaagatgggctgtggcaaccatcagctccaatggcaaaatttcagccgattcaacggggggctatacatagcaaatcaatacatgatccttcgtgctgctacttagtctaaatgcaggggtggccatggccaatgttgtcctctctaattctccgcctcttgtcagtatattgagattgatatagggtttccacagcccaaaatctaggattaccaacatcagagagttagccaccatcaacacagcttactaggacctcatgtcccatgctcagtgtgtcctcaacaatgcttgatcgccacaggcagagcaagcgtcaaaactccatctccatatctgcacatcatgctacctttcctgccagggcaaaccaggcgagttgagtgacaataccaccagtgtcagcttcactagatctgttgctagtgccaccttgccagactcaaaccttagcctgccacatgatttgggggaggatgttctgtgtgaatgtgggttgaggagggggagacagatcttcacaacttagtaaggctgtgggcagggtttctgaaattttacattgaagttggagaggagtaagccatctagacttgtgctgttctcccacaattgtgcagctcacaagggataattccatgattaatcctaagtgccctacatgatagttgcatgtgatatgttgcttttcatatgggtagcatgcttgcgcttataacaatcacaacatgctccccacgcatacatcaaatatgcaagaagcaaacagcaaataatatttttaaaaaactggaaattttccacaagggtttgaatcaaatgtgaaaaaaagtctagctagattaatcacctatccaacattacgataggcacgagccgacccacaagtcctccttgacccactctagttcaactaaatgaactaaaatatcatggatcagcctgcgctcatccctatccagcaagttaaactgccatatttaacacagcattctttggtcagcaacaagctccagacagcttatcaacctaatctatacctttggtatgagtaccactaccactaaagtctaggatccaacctgcctcattcaatagggttcagtagtataataatgtggccccagacttctggtattgttcaaactttgctaattatatgtgcaattaaattgtttattgatgcttgatttatctatataatgagatatttattgcccatacttctctttggaattgaattattgaacacaagtaatattgaacctgaacagaataatcaatacttaaggagctttcaataatttttccaattcagtggagtcttccttcattcaagttatcaaatgcactcacttcccattgttgctccaggaccttaaatattaagacttcattttcaaccctactggacatttgtctagctgagtttggcggcagaagaatttatgggagatagtattctgcgagtatatgaggaagacgacaccaaagttaattggcgtttgacattaaatttgctactagagattatttggagggtggctaaactactcataaaagcagttaaaaccccagcagaaaaaattacatagaatgctggagaactctttatttagtaggtgaagacatctgtgcaaatgtagcatttaacttggcaaatgacccagtaaaaaatgattcaaatgaaagcatagaaagtaaaatacgtgaaccagagcctgaaagccataatgtaagaatgaacagtgcaatcaaaggatatgcaagcaaatccattggacagagcctttttaacttacaatttgctgacatttacatgtgccatagattcttttacatttgccacgtacgctgatttcatgacttcatgtacttgccctgagaaatcgtgttggctcaggaaaagcctggaaatttgacaagattgaattctagacatatccaacttatccaccagagatgataagatgcatttgcattcccatgaagataaaaacatagctaacattccaggtaggcatacaatttttccatccttaagaaagattgaccgccactctgatatttaccctggtcaagaatgtcacctagacttcagctttctcttcttaccaccaccaaggggtataccggttgtgtattttgaatttgcaagttccctgggaattggagcacctgcagtcttcagaatctgaacaagctctctgaaaagattcctgtcctcctcattaacaaagacaatagccataccctccacacccattcgagatgctcttccaacttggtgaacatattcatcaatggaatttggcatgtcaaataatatcacctgacgaactttcaggagatccattccacgtcccaataccccagtacaaacaacaacagacacttctcctgtgagaaaccttctcaagctttctcttctctcattcattgtcttatcaccatgaatagaaaccaccttcaatccagtagcaacagtaattgcttcggacaacagatcagcgccaattctagaactcacaaaaacaacagcgggaggtttaaagtgctgtttacttgtcattatctcaaaaattttctgcttcttctgcttagactccacccaaatgaccacttgtttaactgatttgtttggtctgcttggatttccacaagaaatatgtatcgcattcttagccagtgagtttgacatcttctcaacttctgaatttacagttgccgaaaacatcataacctggggatgcgaaagtgcttggaagatttgcatgacctgatctctgaatcccctctctagcaagcagtccacctcatccaaaacgaatacatcaactttgttaagatcaacattgtgcttcatgagtagatcaattagcctcccaggggtgccaacaatcaactcgatgccattttcaatcctgtagatttgctgagccaagggatctccaccaacaactagagcagtcttaaaaggtaaaccctttccaagcacttttgcttgttcttccacctgcagacatagctctctagttggagcaaggactatagctaatggcccttgcttgtctgtgcatctctctgatcgcacgtgtgaacaatgtgcaattatgggaacaagaaaagaagctgttttccctgaaccagtatcagcagagacaagtaagcttctattacatattgatgaagggatgacttgcatttgcactggagtaggcattacatatcccgcagcctcaagattgagcacaagcttctcagggagaccagaggaagaaaaacacatgattggatctggaacatcctcacccttgacacaaatatcaagtttgcttctcagtgaagcaatctgaccatcgtgcatacttggtattttaggaaaattttcgtccctaatacagaagctctcgtcgccaacaggaagatttacacgctttgctgcttttactactggccttgtttcagcagaaagtttggaaagaagaattgtcttgcattcaacactacatatgtcatcgtcagtctgatcacatatgtattcaccatatcggccacaaataacacagcgaggctccccaacaagggcttctctctgctcaaaacacctttcctttacagatgattctgtaataaggaagaaaatatatcagttcactgattgaaatacaaggaacagacagaagatctgcagttcttataacacaaaggaggtgcatgtgacacattcagccagcatgaaacatttactctttcaaaagatggcagtggttgtgactgcattttttcaattggccctcaaagtattagctcaaatttagcatggaaaggtccaagaggactgaattgtcacgcatataacaaactgaaaaaagaacacattcatttgatttggacaatattagaatatgtatggttaatttttgttcttagaaatgacggggcatgttttgcagaggatggcattttgtttgtaagaataaagaacaatagaagtacataaatggataaacaatatggccatcagccaataaagcaaaaggaagaagaaaagaacagtaggcatagaacatgagcttttgtgattggatttcttgaactaattcctgagacatttcgttgaaaacaaacttgcctatttccttctaaagtttctcgaggttcatgaaatgcattttctgtaaagaaaatcctttgtcacgtttttttctgctatttatttcattatttgtgcatgaacaatgcatactcaatttgtgcggtttttacatctgtacgaattgaagaatagtacagcccaagtaccttccaattcgttgccattaccaggttgagcagacaagtgatcagctgaatgattctcttcttgctccattctattgatgttggaagataaatccacaaaactgcacagaagaaaagaaaaaaatttcagctgagacaccttaaagttgaaccttggcaaggctgtgcatgcatcataaccagcatttcatttattttcatcagaaactagtaaaagcgagtttgcgcactggatgtttatcaggggcggatccaacttgggacattggggtttcagttgaacccccaaactttttgggggaacaaacaaactgttacttgtattaaggttaaggttctgaaattaagagaagagcttcttccaaatctataagagaagctagggtttacgcaaagcaaattccagacaaaagtagtcccgatgggagagagatgaatcagaaagaggatgtggatggatgctcaccaggatcccctcccctcccctgctctgctcgccggatggagatcggcgcccctcccctgttcagccgcgcgcaactcgtcttggcgcgcaaggagcggaggagacgacgagacgggagatttctctttcttttacgccgagggaaggaaggggaagatactccaccgttttatcttaaatttttcactttaaaactagcttacgttatctaatctttacaatgattgttggcccacacgttaaaaaaatacaagctcggttaggaattgtatcgacggtaaacaaaaccaccggcaaccattagctaccgctccacacaccatcactatcgctctttatccatgagccaccatcgttcctcatctccgccttcgtatgcacagtcatatcctctagccatcaatatttgccttctcctcctcgttcgttatatatgctattgtcatgatcgtcgttgaggccaaagatgtcgggcttgcaggaactcgaagaggcaggaaccgacacgatggagagcgaacacgctagatctaggctcctttttactggatctggtggttccccaactattggagggaaaaagaaaaaggggagagagagagagaaaaaggggagagagagatagtgtgcgaagtttgtggcaaagtcactggacttgctggacttggaggtggagcggcggtgaagtcattggacttaaagatgtatagaatgggggtagttcgaattgaaataaaaatgtaaagttagctgtcgttaaataaacgatgatataatatgaaaatttttaagtattttatttttctgcagcacaattaaagatgagttgtccatatctaaacagtatgattggaccgttctgtcagggttacgggttgggtataccctttacccttcgatatacgttacatatcgatatggcatacccacgctcatgcggatatttcctatatattctaaggaaacatttcacggaatctacagacgggaagaatcctactcggacagaactgggtcgttggcgtatcgtatagggtctgatacctccgacttctacgtggagacctccagatctgcgatataaaagggaccccccggggagggtttagggcatcgaatctcagagccaacacaacctacacagcctacgaagccggagcctacgaggagccaagtcatcgagagctagttgaaacaacttgactacaatctcgccggatccgacaagttcccttgttccctttgtaacctgtgttttctaccatataatcccacatcaactggattagggttattacctatcaaggggcctgaaccagtataattcttgtcttttgtttgcttgatgtcgtactacgtagatccttgtaccaacgtaccccaataccctctatatccggtctacggatatcacctgttgacacgttctacttaactactactgataatctcatgatatgttaatattcgaatactgatttcagctaatatatagttagatagaatcggctaaaaacatataataataataataataataataataataataataataataataataataataataataataataataataataacaattttgctcgtgagaagcaacaagtagcatgcacccgcgagcttaccttgtactccctccgtattttaatgtatgacgtcgttgatttttcgatcaatgtttgactattcgctttattcaaaatttttatgtaaatataaaaatacttatgtcatgcttaaagaatatttgatgatgaatcaagtcacattaaaataaatgataattacataattttttttaataagacgaatggtcaaacgttggaaaaaagacaacggcgtccatgaaggtagtaataaccttgcgccgtagcacgcctacggacgaccacgagccgccggcgatggcggtggcggcgggtcggcgagagacccattagaaggcccagctaggacatgtggtgagattttgcgagtttgggctggaaaattacttccgggccgaataaaatgggctttctttttcaaaaaatgggcctgtatacccgccctccagtctattggtcggcctgccaaagaaggcctaattgggaattatgcctaggctagttcctattctcttttttgtttttcaactttgctttctgttttttttttaatcggattctttgtctttgaggttcgtccagattgtactttaattctttatttttcctctcttccatcgatagcaatcggcggggatgtagaatcgatggatgcggtgaacaagaaggcacaatttgcttttttaccatgctcttttctatgttactttttgttttacttaatatgggcatgtttggcatagctatagcttcagctcagacaaacagttttagttccacctaaaatggaagcggagctagatgaagctctctcacaaaataaactaaagaggtagagctaggtttaggcagctctataactctactccagacccaactcctgaagctaaatttagaagttagagctctaccaaacaggctctataaatcatatataagatgtcatagggagtctttgttaataataaaaaacaagaaagatttaccacgcgtgcatatttctagagtaaatccaagaaagattcaatgagcagataagcatgtaaccagagatgcaaatactccattcatcccaaaatataaggcataaccattcaaaacacaaagaccaagaaaatatttaatcatcttcttagttgaatcatattgatgcatgcaagcaatgtgattgggaggtttgatggtataagatttaaaacaaatcaattttataagaccaagagatgatagttaatgtatgcatgcatgtacgctttatattactccctccatttacttttgatagtcatatttctaaatctgaaaaatttatttttggtaggcatatttcaattcaacaacctatcatcttaatgactttctcggatttaatgcatgactcttcattcttccacacaagattggctacatgggcatcgagaaatgtaaatattaatgaatcgcttgtttacgatgaatgactagtactccctccatctatttttgatagacatattttcaaatctaaaaaaattactttttacaggtatatttcaatccaaccacctttcctcttaatgactttctcggatttaatgtgtgactctccattcttccacacaagattggctacatgggcatcgagaaatgtaaatattaatgaattgcttgtttacgagaaataactagtagcttgtttaaatggatgataagtaaaactacttatccttggtcatcgtgccaagataaaatatgactattaaaagtagatggagggagtagcatgtttaaatgaatgataagtagaattatttatccttggtctgtgtgacaagatgaaatatgactatcaaaagtagatggagagagtatgagacatgagagaaaagtggttgtgccttatattttggaatggatgaagtacagcctactgaagctaaccctacaacttttcaccattataagctctatttagaggcttagagctgaagactctaacaagcagcagtttagtgagtagttaactgattagaatttagagacttctagcttttggttgttttgcgagaagacgtctctccacttctagcttttggttgttttgcgctgagattctcagaagcagtcgatacgtacatcgccagttggtaagagtatgaaaaagctaaatatctcgatttatggcttttagtttttttattttataggtatattgattctcaaaatctaagttagaatttatggcatgtttgaggagtttctagctgctacggtttcttccataatcataagctcttctaaacagcctagctttttatctaaattctgacaaactatagctgtataatctagaaaattagctagaaaccagaaattgaaaaatctagttttttaaataattaaaaactaattaccaaccagctgtttctcaaaactttgaactccctaaacaaattcttcgacccgtttagaagagctggaaatttttgaaggtgtaagcttctccaagcaaggcttaaaagtctacaattccacgctggagtctgtagatcacacaagcgattggttacgaaaggcgactctttggtttcagctagaggggatgattccggacagttaccattcagcattcatcatatatccccatgacaatatgcaaggagtatttttccggttttatcatagctaaggttcagctgattcatcagcagctcagctgtgggcggtcgcttgcttcacggatcgaaaagctctgcgctgattgctcccagaggctgagaaaaccaagccaacaatcaatctgatttgatcttttctatccatctgtgactgacaggctgccaaatggactgcatgcatgcagcatgctgagtgtttattttgtttctccctacttcttttttctcctttggcaaaacgtcatatcttaaatcaatagcgattaaggcagacggaaaatgatcgaaaattgatgaaaatgttaaaaatgaaacggggtgaaccggtatctttcggtgctataaaataaaaaacgtgaacttttgatactatatgaccaattttgcctctccttttgtcttctttatgcaaacttgagatttgatttagtagctgttttgaattttgttatgcctgtgttccatagttcaaaccagcttgttgtagggctacttggcttgtcagaatggtcaaaggtctataattcaagcataagaaacattttgataagtaatgtgtgtggtttttaataatgaacggaaatccgaccttcatatttataagtagacatgtacgcaaccaaagtaacacgagtgcatattcctagtctcgaacaaaacgaagactgtaaatctaaggccgagtttagtttcaaattttttcttcaaactttcatttttttatcatatcaaaacttttctacacacataaactttcaacttttccgtcacatcgttccaatttcaaccaaacttttaattttggcgtaaactaaacacaccctaagctccaagcttttcctcttgcttcaaacttcatagtattgcgaggttggaatatatcatatcaattactccatctatctcattttgattatcccctgaggattatgagatcttctcaaaatgatcaacatctaacaagtgtctctttgtttatttgtgcaaagagtaaatgtgcttcattcaatgtgttgcatgcaactaataaagattaatttttattggtgtaatgatatgcaatatttaaaacatgagcaatccatgaggcatagcgatgaaacaccttaaccgaaaaggattaatttgataataaaagatattttgatgtccttgatcttccgatatctaacttacgtaccgattcgtagccagaagttcgttttttaatgggacagagggtgtaagtttcaaaacaccgtgaagacagcagttacgttgacctctctattaagctccgccgttagacaaaacctatattaaaatagtaccacgatattgtaggattctcgtattagaatctattatcctaagtgaccggatatcaccgctgacccatcacgtgacaataatataatatgttttcgtgtggaccacatagacttgaccaatatcaatctcagtgcacttttcgccacgacccacactacgggacaacagaaaacattatcataacccagtctcactcgagtgactatagatcgtcgcacacacacgagaactcgcgagaaaacacacttcaaaacaccttcgtttaaggaatctctttatagggcccataatttattcagccccctcacctcacatgtcacatcactgttccagcatacaagagcacacgatccagtcaacgtgtggccgggccggttgacccggctgggcccactcacggcgtcagcccgccgcgtctggctgacgtgtgggcccagccccaccctcgcgtcgccgtcatccacgccggcgtcgcgtgggccatggcttcgacgggatatccaccggcaggagaagcgcagatgcttcgttgatttttattttcttctcttcttttttttggaattcgtttggattggattcatcggaagaagcgagcgggatatccggctggatattcctccacccggaaaacgcaccaaggaatatgctccgaatcatcggcgccgtacgatgtgcccaagttttttttattgtttttttttgtgtacgagggaaaaatcgccagattagcctcacatcgagcttactactgtactaactactgtagcatttttggcatcagtagttatctgatctctcccgttggattaacgcagctaattactaatcgaatcgtctcacttctcatagagtataataacatgtggttccgttttttttccacctttaaattattgtactgacagtctgacaacggttaaaaaaataataattaccccttcgcgggaaaaaaaattaattcataatgaattaatacggccgtgtcgttcttgtactggatagctagcttgtataatattttcaaatttgttagagaaagtcaatgtacagaagcacgttgattggattatgtgagacgagtgacatccatggtgacacggcaaattgctggatttttttttatgtcaggagcttgcttgattaaccagaatagcatctgattaatttaattacgaacctatatatagaagaaaagttaatatttaaaattttcgtggtccacctacatcgagtgaccaatcgaaatcgttgtgatcgtcaacgccgatgcacgagaaggagaagataccacttcgattagttgtgcgatatctcgtcagaatttaattaatctttgattaataaattactagtatatgcttattctaaagagtagaatattcgatgggaaaaattcaacgtctcgccacaataaaaaaaagggagtatttcttgttgccactgcaatttgcagttgataatttggacaaaacttacagctagatacgcagctagttttgttggatgggcataaccgtttatgcttcgttcctgtgttaattagctaaattaaccagttgttaaaaagaagggtaatttgacagattaggaggaaataactaaactcgtggatcaggatctaactaatggatctttgagggaattaattggatttagcaacttaggagtatttggcttcctactagttttggccacatctatttcaattccaattccaattccaagtatatgatcataatttgctccactccactataagtaaaaacaacaaaagttattataaatcttatgtgcaggttacccccgattattacagtattacttgctaccatatctcaaacatcgatggctgtattacttgttaaaaagaagggcatccacaatgtgaagcaaagcaatattatattctattcagctacctattatcattgtgcaactagtccatagagaaaataaaaaaaaggtatccataagcatatggactacccataaggaataaataatactccctccatttcgaaatgtttgacgccgttgacctttttatcacatgtttgaccgctcgtcttattcaaaaaaatttaagtaattattaattctttttctatcatttgattcattgttaaatatatttttatgtaggcatataattttacatatctcacaaaagtttttgaataagacgaacggtcaaacatgtgctaaaaagtcaatggtatcaaacattttgaaacggagggagtactatctatctctatttctctctcatctcctaatgctctatagttaaagtctctttatgtgggttctcatctatatggatcatttttgctatatacatttgtgatgactttatatttataagcgaaatgtttatcacgttacgtgagggtctgttcggatgactcgatggacgatggattatcatggccacacttctcaagctcatcaaaataatttctccgacaactttgttgatcaccgtttacttgtaacattttcctttaaaaaaatagttttcaactttataacatttaattcttttcatacatgccgtcgaataattatctgaatcgtccattatccatcattcatttatcatctaccaattttaaaaaaacagcatatattcgattggatataaatgtcgggtaaaaaaaatccttctcagagttagaggagaagaagtcgatgcacgaatcttgacatagatccaatggtccaaaatatgtaaggcctggtttagttcccaactttttctttaaactttcaatattttcatcacatcaaaactttcctacgcacaaacttccaacttttccgtcacatcgttccaatttcaatcaaacttctaattttagtgtaaactaaacaatttctgtcgaatgatatatatagtactacctccgttttttaatagataacgctgttgactttttcttatatgtttgaccattcgtcttattcaaaaaatttacgtaataataatttattttgttatgagttgttttatcacttatagtattttaagtgtgatttatatcttttatatttgtataaattttttaaataagatagatgttcaaacatatgagaaaaaatcaacggcgtcatctattaaaaaaacggggagggagtatttccgaaaaaaaaagcctcttcgttgcacctaccatttcccatcgcaacccctcaaaaaaaaacttccaacccggacgaattcgtcggggaaagcggcagtgcgccacgccgcgagatatccccgtcacgaatattcctcttcctcctccttctccccactatttatcgccatcatctcctccacctctcctccaccccccctgcaatttccatttccccctcgatcccacacaattcgatcccaatttccggttttcgtgtgtgaatcttttggagagatcgatgaagttcggcaagagcctgagcagccagatcgtggagatgcagccggagtggcgcgacaacttcctctcctacaaggacctcaagaagcgcctcaacctcatctccggcggcgccgccggggagagggcgagcaagcggcgtcgcgtcggtggcgcgacggcggtgacggtgacggcggcggcggcgggcgggatgacgctggagcaggccgggttcgtcggcctcctcgacgccgagctcgacaagttcaacttcttcttcctcgagaaggaggaggagtacgtcatcaagcagaaggtaaaaattcgaattcctccgtgttccccttcgcgcttcgcgttcgtcgctgttcctgattggttccgacgacggggcgcgcgcaggagctccgggagaggaagatggcatcggcggaggaggtgatgcgcgtgaggaaggagatcgtcgatctccacggcgagatggtgctgctcgagaattacagcgcgctcaactacaccggtgagccgcccacactctgaatttttctcactgaaatttgcagcagtttatataattttcagagtttttgtactatccatgccaggtgctatcgcgtactgtattcgtgaaatggcacttcacatgatataaacatggctagttttactttcttttttttttctactgtagttcttaggacacatgggaattgaagctgttggggcctgcatttgtgtggtttttgtcacgacgcagcatttttttgtgtgattttttttgtcaggatgtgtgaataggtgaagctgataagttttgtgagtcagtagtacaatttggaacccatataattcgtctaaacggttaaacgaattctaacttttcagactgaatccatatagtccataaaatcggagtaggatagaaacaccagtaaaaaaccaggacacgtggacccatggtgggtgccgcctgtccttttcagaaaggtcaagtttcctgaaaaggggccagtcaattgtttaatatcattttatgggacatcaagcgtgcgtgctgataaaaataagtgtggtgcccactaaactatgttagataagacatgttttccataaagaaatcttggagttgaaaactcgctgacttttataggaccacgtgggccatggcactctactttttgtagttagatgtttttctattactataaaatgtataaacttgttctagcatatttttaatgggagggaccaataaaaaatgtcttttcctttgtgggatcttggattcgtcattttgttgtgagaaacatacttgcactccctaaggaaggaaatatttatcgcttcatgccgttgaaatgacttgcacctatttctttttagctgttggaaacgacagaaaattgtgaccggagggagtataatattacactttctataacttttacatctgatgatgcctataacaatgttataatattccgcagatttttggcttaaattaccggcatttctagcttgatatgcttgctgttatttctgttttgtactcttatttctggatatgcttctacatataaaaattcccttttggtgcaaaggcttatgttacacatgttcctcttgtgcaggattggttaaaatcctcaagaagtacgacaagagaaccggctccatgatccgtctccccttcgtccagaaggtgctgcagcaacccttcttcaccaccgacctcctctacaagctcgtgaaggaatgcgaggagatgctggaccagctcatgccgacgaacgaacactcggtagcgagcgaagatgggaaagatgacagcgaaggggaggagaagggttcaaagcccagctcctcctcctcggccaacggtggagccgtcccgggagaggccgaggccgaggatgagaggagcacggacatgaagagcaccgtcacggcggcgctcagggcgctgagagagatccggagcgggagctcgacggtgagcgtcttctccctgccgcctctgcacggcagcaatgggcaggatgaaccggggaggtgaaaacgagaatgggaaagaaaaggaaatgatcttgacgctgcgttcggtatcgttgtttcgcctgcacttctgctcaaatgctcagtgatcttggcacttggtaggagtttgtaactggctatcagttcatgtttcgttttaacttgggtatttttcgtgtaatctgtttgtttcccacctgctgtaaaaatgagagggaaaaatagattagtataaagttcagggtaaacatagatctcaatgtgcagcctgactactttgtcacttgatgggatgatttttttttgtttatgtgcttctgtgtttgttagatggtttgtatggctgtatatatatatatatttttagtaaattgcagtttgggtcatcttttattatcaaagtttcactttggatcatcctaaaactaatcttttcactttggattgggtaactttgctattttttttgtttggagcacccaattctcttaattattcatgtgtatcctttgttctggtaaagatatgagttgcatataaacgaggaagttcaccattgcaccgaaactgatttggtgatgagcgttgaagaagttgattggggtggtccaaactgaaaaaatgaaaaaaatggtaaagttacccagtctaaagtaaataaaaattgatttaagggtggtccaaagtgaaactaggcaattcttttttttatcatgcattgtacaatgctgcacgagtacatttacgatgcactgagacaatttggtcagaaattggttggtgtggcttgtggttcctacatttacgtcacagattcacactttgctgattaaaaaaaagagaatgagatgctggttcctcttgtttggtgttttggagctggcaatttaatctttgcacccgcagagttgtcaagttgatgatttagggatcatgtcgttgtagatttttccttatggagcagatagaactcaaatattctatattttataggtttctcaggcgcatgatgataaaccgtacttgttagctgcaaagagttcagggtatgcaatcttaagacaagatcagcaagctgaagttaaaaactgtgatctcggtcaggcttaccttcaaaagatggaaacttgcatctggctaaagcagtatcatccaagtaacattatatttcagttgtaaccttatacaacaacagggctctacagcttgaaatctatgctacaaaaaacagttacatcgtatacatctttcagtcgttcttcacaaatcacaatgacatgcttctgatggtcatctcttttagagtggttacagatcggtgaaatagcttgaggctacgcccgaccttgtcctgcccagccaatttaaaaaaaaatcattttcagagcacattaaatagaagcatgaaagtttcaagtatatgagaaatttgttggtaaacatctttaggcagaaaatatggtaatacatcacattttacaggggtatatctttataattgcatttgcatacaattaattaaaaatttattaggcctaacaaaaaaaaaatgcagatatgcacaaatatgagaactcactagctaagtgagcaaatgaaaagactagagcaatccacaatttatttatgaacactatacctccgtaaaatgctctagcctctccaggataggaagcaactcatcagaaaatgaagaaatatcttttgcacaagacctacaaaaagtacagaaatgcaatagttcttaagcttaagaacaaaaggaccaagacagtaaaacctctgcagaacaaacaattattcatactcgtcttgaaaatgaacaaggagaatagtgacagcgcattctgcgatttggagtagaagggttatgagctggcctcggttgccggccatgcaacacaattctatcattgcaatgaacctcctgcaagagaaaaaatgttacatgtactgcaacatgtataaaaaaaccttgcatggagtagatgactattgcagcaagatcttccaaaaggcaaaaaaaaaatcatgtccattgggtcaaccagggcactgtggcatgcagctattgtataacgttaacagataagaagtttaccaagaattgtttggttatattcttattctctttttatcgttagagactgaggtggtgcatttctcccaggattctagacactcatttagtctcctattatcccaatggactaaatgaagccataaccacgctatcctgtagaaacataatatcggagtagctatactcgattgctcatgcatgcatgatgcatcacaagctgataaaagagattattcatggctaccacttaacaatgcatagttcaatgcttaaaatagttcgtcttcaatgggctgttgttgagtattgccatgccaagcagaatgaggaaaggtggaggggttaggaaaaagttttacattgttaaatatatttctgctttttatgtggttacaggtaagatcaaagatcagagatcaacaaaaagcaaatgacaatgaagtcttcattattaacccaagaacgttatggacaattgttgaaaaaatgaaagcatcaagtaccttttacggatgttatcgttgggagagatacaatcttgtttcatgcataattttattatatcatcaacctccttcctagataactcatttaagtcacgaatctgtgcaggataaaacagacagttaatgcatagttgcactgaaatcattatgttctgctaaatgttcaaatgaactcctactgtggatcaataattcaacctcaaactttagatttagcacatactttcaaaacttgaaatttccccaataataaagcatacataatgaacaggtaaacatattcgcatcggataccttatttagcaacatatatttttcttcagctactctttccatagcaactgttattgagtttagaagatctgaaatcagttgtagtgttggttgctgctgaccttcagtagtatcatcatacgaaatctgcaagttcaagaagctgattatgcgaacttggatatacaaaaatgaaaatatcaacaaacagttaacagagaaattgcatgcagacataattttatatgcaacccccacaaccacttgacaataagagaaattgcaaaggtaaattgggggccatatcacttgtttttgggcatgagatcaacagataaaaatcacggaaaattttaatgtagtatattgaatatattgcatgaaaatgtatttggcgagacaaggaaaataaccagcaaattaaaaattggaagtaaaataagaaattaaagtgttcttgttctggtgtacttttagtttgaaactgaaattcaatcaaggtatattctattaaatacttaattactttggtgtaaattgcatcatagattcaaaatcaaatccaagaaatttgagtatatggctaaagtaaggttatcagatcgttttgctagcccctgtggaaccacaggtagtcatgtattgtgtgtatgttagctgctgatgtggaaacagtggaaatacacacaatcacgctatatgtttttaatctagctacagagagcacttgttcaaactatcagatctttacagcaacagctatatgtttttaatctagctacagagagcacttgttcaaactatcagatctttacagcaacaaatctcataacatttaataaaaaaaatgaagttctataaaagatttgaacacacaaaataaaattcatataacatctatttatgcactccctctgtcccaaaatataagggattttgcctatctagatttgcagtactaggatgtgtctcatccaacctcccttatattttgggatggagagagtatcttctatctaccatgccctgccaactgactcatcattggcggctgccgctggtaaataatcatgaataattcatgcacatgacagagagcaaactactcatcattttccatgtttatctggtgctccatccaaagttatttgaacgattacacctagctatatgttagaagttagcattacatatcacgtggtagattctagtattagtagagtaaattgcactttgcaatgggtaatgaacctcatttcacaatattatgatcatgcaggttcttagcacattactataagaagactattcaacatgcctacatagaatagcaattctactatccaaagtcccaagagcactgtctgcaagccacaggttacccagtcaattggtggtcccaacttttttgtggttttgaagcaaatgatcagcacagatgaatgtatgccatggtttctactccttacaatttcagtcattcaaagttctcacgtaagtcaagttcagaagctaatcatgtacacataatgacataaatggtttttcataatataatttgagaaccatggaaaatgattaatgcatatgtacctacaggtatttaaaacattcaattcaatgcttaaagatgtaaagcaaaaaaagctgattcaaatgcttcttcacaattttaaaattttggaaatatcgatttgaatcatatgtagtgtagctaactaagaattcactaacaattcaaagttaaccaaaacaaaattttacattatcgactattcagaaaaggtctccccctttgttatcatggctcatggccaaagcaagagccgggagatttggagcagtgttaccagactatgaaaatattaatgaaaattgaataggagctgctagaaaaaatatcttacttgaaaccgcatatccttctttgtagccagaacatataggtaggagataaggctgaagcacaaggcaaacactatcaattctgacttctgattctggtaagaaacaacagttgcaagcattagaaaagtctcagggtgcatggatatgcatagttgtaatgaaactatgttaaagagaactagattgtacctcaatcatgtttgatgattgcataaagttgagagacccaatatcaagactgaaaagaaattgcatcatggaaaatagatcttggacaaagctgcattcatcattttcctcatatgcccatacctataaagtggtagcacttgtgaagacacattacgaaaaagaccagaatcaaatgagaagcaaatagcaaaccttgccaagaatagagaccaccatattaagccgctccaagttgaatatattagctccagatatactctctcttaaaatgatattaaaaacaggctgatgctgcttggcgaagtctactaactcccggacaattttgttcttcacctgaggaaaggattaaattagtataaagaagaatggcatatagagagattacagaacatggaaatattgcatttcaataaagctcatggcaagtaatagctccatgtaattccccaacatggaacagacaaaaagtttaccaatgaggtaaactggtaaaacaatattatacggaagtaattttttttctcgaaaaagcaggagagctgcatttcatttcattaaggtgaagaaaaaacaatacaaaaaacacaacacaaagaaaaaacaaagtaggagtgcccgagccctcctaccaagacccacacacactagacaacccggggagcttagttgcctaggttagccgtcccactaaggagcttttgaaggcgagaagctccagcaacaccccaaagatggccctcattttctatcacttgcaagaccgtcgctactctaggattggcgttattgaaaacgcagtcgttgcggtgcttccaaatctcccaagctactaatgttaccaaggagttaatccctttccgcacctccttcggctggttcttcgttgcttggctccaccacctcagaaagcggtcggtagagggctgaggcgcagcctcagctaaccctagtctcaaaaagattgccgtccaaacttggcgagaaaaaacacaggagatcaaaatgtgttggatggattcttcactttgatcacaaaggggacagatcactgtgtgctgcagcccacgcttagctagacgatcggctgtccaacacctattattgatggccagccaaatgaagaatttgcaccggagggaagcccaacatttccaaatacgtttccaggaagtaatggaacaagtccattttacctctcttgacaaaattatcacctgaggccaaattttcatcctctaaaaacctgtcaattttcaccaaactgttgataaatgtcatggcatggccaggacagcccttacagctaattagcaggttaatcatcaaattaggaataagtcaaataaaggtaggagattatctagttaagacagataaagcttgtcagtaaattagagatagatcagattagtgtctataatattatagatttgttcctcagatgtcaaatcaatccttcttatatataaagggagcccatgtaccccatcattaattaagcaggaaaatcataaagttaggttacttaggtagattgatcagagtctcctgaacatcggacaagccaatgccaatgagaatgatatggactttatcccagtcttcagaccattacccgatccatgaatcagcgtccataacataaatcaagcacaaatcaaacccaagccatggacaatcagttctagctgatgtggtacctccgtaggccagaatctcataataccaggcctagcacaactacaaagttatatgaaatatcaagtcatgaaatgataaaattcaggataaagcagtatatgcaaatatttacttcgccctgagctaatagctaatgataatgctcttttacaactgggttgatgtaactatggagaactatagacatttttcatgggttctcaccataccatatgttgcatttataacccacaagcaaacaatgcttgaaatgtaccgcagcattcaataaagctattataagaaagtatctatccaatgcagcttgtgaatgatgctattccttcacacctgcctaaaaaacttactatcaagaaaagcaggaaaaaggaaaacaccacacccagcaaataacttagcttttaacaacatcctcacttcctgcagggactgaggtgagactacctcagtccctgcagatccaatttggccaaaagtgctgtggggtaatgacaaattaacaatgatgtaggtgtagtgtaggaccaaagagttggccgtacaatgggctgggcaatatggtgtttcctctagtaaaatatgggttttaaaaagtgaaattcttcagtagggcgctccaaactcccgattatccaaaatggctatgttttcatcgtttcattatagagcaaacaaattttgatttccagatgtgccacgacccaaggccatgacaggataaccacctcagagagatagcaagtggtgttggctcttggagaaggaatgtagacttaggttggggagaagaacattaggggaagagattagactaattgattttcattgcttaactccaaatgaatacaatcccatccttatcttatttcccaattccctaatcttatctcctaatccgctgccacagtacccactgcgctgttcatctgccctagagttggctccatgggccttggcctcacggcccaaatgcccaattcccatgacaaaatgcaagtgcgatgcagaaaatatggaacctccaaaaattggctaacctcaagaaaatcagcggagtccacaagtgaggtgaaagatgtgactattctaagtatcggtgcagtaagtgatctcctcttgtcaatttctccagctcgctctttcactacattggagttgagccttgaatttgcctaaaacataaagatattgtaagtatttttgaagagaggataagcactcacactggtaacagagagacagagtcaacctttttctgcgaacccatcaggttgcacgacgaaagattatgtagagcacccatggacaacagaatctgggagccatgtttcccatagtggtgactgattctcagaagtaatgacaattgagcatcaatagtgcaaaatcgctgtgaagactctgatgagaatgatgcttcctaataaaaataaaaaagaaagtcaatgacaaatggcaaaggtataaacgcaagaaagaggactggtagaattaatacactcattgatatgctaactgatagtacaaaattactgcaaatatggaaacataaaagaacagattatcacaacaatcttactgtggagtaccgtcaaccgtccacccacataactacatattcagcacgtgtattacatgaaaattaaatggaaagattcataaaatgattgtgtgcagtctttcaggaaaaaaaaaaggagcataaccaaactttttaattttcagaagaggtcaactggaaaccatccttgtcgccttgaagcaacactgatggcgtaacaatactagccaatgggccaggctttgatgatttagcgttgatcatccaataatacccagaaaaacactgagcaatttcacctttaaataccccccataactttggcagtacaaagcatccatcaatatccagaccactaaacaatttcatcttaaattcctaacctcatactttgcacaaaaatggaagttctctatagaggtctacaagcagagccacagctcattttcaagttttttttttttggcagagacattttcaagaatatgtaaaaatgtgatttgcatgaccatgacaaaacaatgccttaaaactataacagcagatttcttgggaagaagtaaaagggaaatgaagtctagaccttagacaagtagttgttaacatcacttagacatgatctgagaattcctcgactctgaatttggttcaaaaaatacttgtcatggtcaatactaatcagtgaatcaagaacgtagaatgaaattgctttccctgcttcacttccatggatcgcatccttggcaacctgtgatggaaacaaaattgatctcatgtttgagttataactgtagcaatttcatagaaagcaataatctccatttcaaaattcatattagatctaggtttatggggtaacatgagatcaaatcacaccattgcaatttcatatttttcaatggcgtgttttgagccttgcacgtgtaggtggataattgatctaatgttcatatacaaatttaagatttgaggaaaactttttgcattttgttttgactaaatgtttgcacaagtgcataagtagctggataatctgtctctgatcatatactcaattttaaattttaggataattactcttatgttgcaatttatgttgtaccctcaagtatattcacatagacatgcaacaccgctgctataaacataagcattgtgcaaaacatttcaactattttttacataaatagaagaatgacataccaaatcaataactgcttgagcttccttccttatgatagagaagttgctgcgtgctaattcattttgttccttgagaacctttagaaagaaaagggtaaggaaaaggaaatattcccatcaagacacaaagataattaatagaaaggaccttttgaagaccaagttcatcatcatctccctcttgttcttcaagtagtaagaaccgaagaactggtggagggacatcagagtcaagggtgctacggcagtactgaaaataacttaacagtaatgcatattggctgcaaaagagaatttaaagtcagcatatattttgtatgaaagagaacaacgaatggaacagaaatgtttttaatgatcatagtcactaatgatagggaagttaccgtcttctcaaggtctcagaagattcatttcttagtattgccatcgtgagtttgaacaataatgaagtgcaggctgcatttgacaactgctttgctgaaatgatgtcaaggcaagtaactgcatcagaatcggcaccggttgggcatatgaatctttcatcccgcagtttcgccatacaagtcaatgccaccttgaaaacatcaacatgcataaaattacaagtttgcagtaggcgaggaactttattaagaggttaacacttgatacaagccgataaacaacaaacttacattggttaaaatatatgccattttcactgaacaatctggagatgttgtggcacttaatgaagcgtcaaggagcctgcagcatgcaatatgcaatcagtaaagctggtacatttgtgacagtaagagtttgtattcttagagaagggagacaacactcactcaaacaataaatgagaacgatcttcaagtaatgacatccttctagatactgctatctgtaattagagaaaaatagcagcgatctacataaaaattcgcaccctaagaaaagctaagcagacaaacaaacaaaagactaacttcaacaatttgagaccagccagtcaacatgtgaagctgggctgcttgttcttcaagatttttgttatatctccaggcccatttcagcatctgatggaatgattcttttagctcgcttttctcagattcacttaattgtgggttcaataactgagacatctgtaataaaagaagcaatccataaaaaaaaccataggaaacataaaagtgtaataacaacgaataaggctgaaaaaatgacctggagaagtttttcatgaaatgcatcaagatcaatcaatctatcgcctcgctctgaataataatatacaccaccaaattcagatgtcgcggaattccttaggatctcttcaatctattagcagaaagaatcagatgataactaatcgaacttaaaaagttgatgtttaaagggcagacctttgattcaagtctcaggttagaaagcatctgggggtatttaatggaagtgtccggacatctgaactggacaacttcaagcaaatccaaaacctgggtgaaaaaaataacacatgagatttgcagcacggaaacatagttaacattgtcttatttgccaagtgggatatttatggagtttgtgatgtcctgactcctgaatgttgcgccatcataattgctccaaaaagacctcaacatagccatctagccccttcatccctaatatacggagactgtcttctaaaagttggcgctaggcaccccctatatggtgcattaggtagctgaacttgcttgggtggtatttagttgctattttggtgttatataactaattttcatgttatgcttgctaatttcttggatctgactatccgacctaggcacccactagccgccgcctaggcctgactagcgccttcttgaaccatgaagggatccattgtgggaaggtggttgggggtaagattggatgaaaattaaatgaggggtggttgattgggggaagtaggtactctagaatcccttatatattttgggacaaaatttgaatccttggatccctgatattatgggacagggaataagatgaccccactagatgcaagcttcgttacactgacatgcattttggagtgttattaatcatgagaaacagaagtacagtacttccataatccaagtgctctgagtagatgggaaaggcttccagtaacataagaaattgtaggccctgcccccaaaaaaaactttcttcacaagtacacatttcccttaaagatggaatgcattgactgtggatttcccttaaagatttctgatcaaaatctgatagaagcacaaaggaatacaagcaaaggcctgtacaaataaaactacatggcacaccaataaagggccatataaaaaaaatagacagatagaagttattaagcattaccttgtttccattcattgctaaattgctactgccaggagattgtaacaggtttgcactccttaagttctcagcacaatggccaaaagtatgacatagaatagccaaacaggactcccggtataaggacgatgatatatcagatacatgcaatgccaatgctagcatctttagcaaccatgccctctgaaattaacaagttgtagattaacaggatgaaaaatgggtggcatcaagaagtttgtgcctacaaatcatacctcatggagcatgctaatacgaagagattgattgttgttccttctcggaagtggtgacacaccaatggttccaacatgctgggaacagtaagcaagaaaagaattatgacttccaattcaacatttagctattttaatttaaaagaacaaaacaagaatgtgtaccttagaaaagaactggtattttgttgtgctcaggagatccatgacaggcccacaagttaaagggtcaaggcataactcgtagagaagctgaattaaaatgagtcaaacgtacattttgacactaaaggattaaaataaggaggtgggttctatccctgagaaaacaaacctgaaaaccgaattcatgcagtaaagcatttatatctggctttgtcaccttttcaagattgtcaagaattgtctttaaacaactgtggcacaatatgataattcgtcaaacaaaccttatggctatacaaaaaacaaagagcctcgagctaacctgtagtgtgactttggttttaaaactgtccgttctatggatccattgacatcgaatcttaggagtagatgtgtaatgttgggagctggacgacaaatattgtcgataagtagctgcatgacaaaatggttattacagttagaagataggcatattaagtacactacataaaagaaacactaaagctgaaataacgacctgtagtattaggacaccaacgtcatcttttgtgttctctatggcctggaaatcatcaaagcggaactccaagcaagcagcataatcctcaattaccgatttagcaacatctgctttcagaagcaactggacaagaccaactattctagaactgcataaaacaaaatggtgaaaagattggcacattaatcttaattactctgattgcaggcgtaaacatggaaaaaggtagacttcactaaatagtaatctggaacataaatttggatatacctcagaattcccataatttttatagagcactgttgaatctgaggaagataatcatatcgtacaaactccagtaaagctataatatgtctatgattctgagctaacacaacatccaacggctgcatagtgcaaagagtaacagacacatcattagatagagagaggcatgacgagcaaaagaaagatattgacataaagaaagaaaacctggtagagtggacggaaaacatcagcaagcaccagatctctctccatcacaagaataaatatttcaaatgatagatggacagttttctccagaagaatcccataagtttgggtagttcgctcattaataagagtgtccacacccactgatacgatgttcataatattccggaaagcaactttcccactcatgaaatcctgcattggaattttacaacccaatatttatacagaacacatagacacatatagaagttcaaacaaaatatacatatcattaaacattattagaaacatcagaatattagatgtatcagtgagattgatataccccataaagcaagagcaaccaagaaatcacataagattcatataaactgaattgattgtcacgtgttatctgaatcttacaggattatgctttattacaggaattgcagacaaaatcacatgtgggagggatagagtgcaggacttctaaaaagagaaagtaaagagctataagctcatgtttattttcctgtgaaatagaggcataagaaaccaacccatattggtttttcccgattctattcctttcttccaaaggctgcataaacttttcccaataaatgaaatcttccaaacaactctatgaaattccttcaaatcaaaggagccttagggcctctttgtttaggcttaggctcattggcttagacttttaagttagctttttggcttatatgatttacaaggcaatggatttgaaatcctaagtttagtggtgtagttatacctctatctcacataagctaaaaaagcttctccaacctagcttttggcttaatagtgtaagagtggcttatggctttaaaaaagccaaacgaaaaagccgtttgtttgtttaggcttagacttttcggctcaaaagctggtttataagcctaaacaaagaggaccttaatctgttgagaacatgagctgagcaatgcagaatcaacaggtagtaaattcctgtcaattgttgttttttcaaactgacaacattgttataaaggtggaatacgtggaaacaaagctcataggccaccaattgacaactgcgctcgatgtccattttccagccataatccaatgtatagtagtactgtttctattaggatgctcaacctttctagttatgtaaagtacacactaggtgcgcagtatgatgtactaaaggtgtcctgggccaaatcaaaatgtactggataaacacacaggacaatgagtgcaataaaaaagagaagtatactatgccatcaagtttgcctggttcctgcccccaaaattaaatagaaaataaataaagtttgctccatgtctgcaatacgacatcaactcctctcttccttctataataataagccattgccatcaattttggcaccatttgtgcaactcaatgacaatatacaccttgccaggcctatgagcgctcatcggcaatgagcttatccccgatagctagaatactctgatcaagctaaatctaactgtgtttcaatgtttcttgattacaattgggcacatgggtccatttagaggaagagttcccctgccagtatgagggtactgctaatgcacaatatcattaacataacaccctagtcacttcctctatttcatttccccaacccctcccttgctcacttgccagtatgctgtgtgtgactagacctccatgaggccatttttggccatttggaaaagctaaggtagctagcagcaacagaacaaactcaggaacaaaatatttttattgcaagaaaattatagtaagcttgccaatattcacattcagcttgcttaagatgttaaagccacatgagatcaacaattgaacatactttgagtagctcaagcacagggagctgtctgtcgattgaggcatgagatgttgttgaaggtccagatgcgttaacagcagcataaatatcatcatccttgatgtcatacatgcttaaaaccctgcacattatcaattggcaattttttttagagcaccgttgcattgtataacacatatgcataagtactgaagatggcctgttctctttgaggaagacatcaaactaatgggatgaaaactctgaacactttgtgtacaacttgatgtgcatttctttgaatatattatatcaatagggttcccaactatttgtcatccaaaaaatgacaaggtaaaagaaaaaaaaaaagcaagtaatggaacatatgccaatcattatgcttacatgcggaagtgctccaagcaagcaactgccagttcccacttctcccgaggatcggcataggctctttgagggaaaggcccaaatacatcttcgtaaacaaacttaaatatacccataaacctgttaacaaaagaatctggatcttcaaaatgtttcaagagctagcaaaaatatagaatagttagtacctccggcccttgtcacttatgtttctttcttctgcaattagagcattgactaagttgagaaatgatattgtggatggataactctccctcattgcttcaacttcattcaactcaaacctcatgtcatagatctgccaaacacattcttccatcagcaatttagtttacagcattaatcaacctgccaaagtgccttctttttccaagaacagcaatgcctcctaatttaaacagagttgcaagggatagactaatcccacctgagggtaaggtaataactactaaacaacttatctgatgagtaatgcagccaatgcaaaagtatctgaaaggcatgtgctcaaaaagcacaagataggttgtgtgtggcagacaatttctgttagaacacaatatccatttttaatttatttctcaaaaaacatctgccaaaacactaaaatttagaaagctgttctaggcttctcgcaaaaaagaataccaaattccacaccaactatagtaaactctataaaatttaacacattcagtagtttgatatctggcatcagtcacagcacatagattaaggtcctcaaatggcagagaaacaaaacaaggacatgtgtaactaacaagatttatatccattttatatatgtgttagttacaaaagcatcaaaaagatccaatagttaaatatcagagaaatattcacttggaaataggtctgaaaatttgtccccatagtacttgatatcattcagagttcagacaagttcaaaagataaaagtgtagcaacacagcaaacttgatacctgtgttgcattatgctgaccaagtggaggcgtaaccaccggaagatcatattgttcaagataactccaaatagcatccttcaacagcggtgatactttgataaatgcagtgatcgaattcctcaaagccccctgttcatgaattttagtatacatgaatttaaaagcaaaacctcaaaatgatatcaaaagtaaaaaaaaaatgtaccttcaaaaatggtggtacattttcatagctgaggagcttaaacaaaggctcaatatcagggaaccatttccttctttcagtagtattcccattttcaacaacctacagcatattcataatttatgtaataaaacaaacagatatatgtgggtattgcagactattgcatcataaagaacatacccatgggcaaaagaagaaacaggaacagattattatgaatatgcatgaatgttagaaacaaaagcgacacagaccaatttacgattgaatgcatctgagacaaaaggtaaacaagactggagaaaagtcatctagctaaaatccaaaatacagagagtaaaacatatgtcagacctaagcacaaattgggccagaacatgctagttattaagaatccaaaagcagaataaatagctaagataaatgttaacagttgacaagaatcctaccatgataacctctgagggaaatagcataaccatttaaggagttacaagactaggtatgatttcctagctatagttttgagtacagtttctctagctttttttactttactatatagtcagtatttcttcacaagaagagtgttaggccataattaacttgtcagatcaaaataatgaaatccaccacaagagcacataagtaaggtgaaaataaccattggaatacaatgctcttgctgggcaaaaaaaaaaaagcattgtgtaaaaaaaataggtcaaagtccttaaagatttcacagcattgctagaatatgtttggatggaaccaagataatatgacagtatgctgagaagtgaagaccttctggagaacagctaaatacgaaacaagtgcctgtgcatccgcttcaggaaactcaggcatcacgcttgcagaagattgaagggattctttgaacttttcttcataaatagataagcaatcaaacaaagtgctccaaccaagtgaacggtaaacttttccctggagcagttcgtagactttggcagcaccaacttcactggaagcctacaagaccagattgttacaaacggtgtaaaagattgaatgtgcagcagtgttatgcaacattttgcataccaaagtactaagaagtccaaggaatgccacaagagttagtgtattggtgtgatcttctcctgcagatatgacaaaggtccaaagttcctcgtttccatgcactagctcaggttctttctggcgagagcacataaatatcaaataagtgatgtccttgaaattagagcttagtaaagtgaaaaacatcatgggaaagcatacttgaacgccttctatttacagcaatagacatattctgtaatagaaaaaaggaagaaaaaagagaacagtgcgagcatgtaatgtccaaaaattcagaatttcgcaactaggaaatgcagatcaaggttgtcataactcaataatataaaaacatccatccagttcaaaattacaagagttgatagcagcagctagagaagaatttttttaatggtgcggcaccactcaagctcacatcttaactcaacttagaatatttgtggtatggctaaattacgcagcaattggcaagagtccctattttatgcattctacagatcttttaagcattattgtctagaaaactgtcacatgccacatttgtgatttgcccggttgcccaacatctacatacagttatatcatagatatatatacctatgtcaaactaaaggttgcatctgtttagaagtcaaactgtggttaagacagatatgctcagaattgacagagcaattgcctagaactgtgtcgaacttgtgaagttttctccctagaacctgtagtttggaattgcagtagtttgtttcataaggaagcaccaaagcacaatcataccagcacaagtgttatagtcttacagaaataagagtacacaaattatacttagtgaaactaaaggggtatataaacttccatagttccacgaaaatcaaactaaatcatgtatgtgcagtttggttgatactgttgaatatattgatgtaagaaacaatacctggtatatttctctaactaattccaggagagatatgaaaggctgattggtaggctggccaatttgttctccagttctgctagggtcttctctatgatctcttattgacccatatggactgagggcattcattgttttttcctttatttcctttatctgttatcaaggagacatgtcactattggcacccatgaactcaagaaaggcattaaacatctcgttatatagccgtattttgagcaactactctaaccttgtctctagaagttggatgggaaagaaagcacatcatcaacttgtgcatgtagccagtgtacatgtaaacaatgtcctcatcgtcattctgcatcaaatgagaaagaaacagcaatagctagaaaattatatgatacctccatatctagataacagatgtttggaattcttgcaaagaaactttgaccaatataatatatgaagagcgtaaagacaggcaacaagaaatactgaactcacttcatgtgtccaatctacatacttatgcatatattagtgatcagagtttgccaaatatgatagggaaaaaaataacagttattgcagtaggtgccgccaagaaagcggtgattgcaggctgggatatagcacccatagtgtaggaagttgtatttgcaacagatgtcacaggatatgtatgcttggtgtgtccctaaaatcaatgcatagtatgtagttcacgttaatttcatagaacacattatacacacaaatttaaaaatgtcaatattttagattatggtgtgggaatatggcgtatgctatccagcaactacttgtgctaacatggccaagcacttcgttttaaggcattaaactaactgaaagtactaatatagccattgtaatcatctgcaaccatgcaaaatcgcatgctctatttcaacttacgctcaaacaaaagcagtacaccttctgatctcatgaatcatgatgcaaaatttcatgaactcaaattcctgggaagcagcaacgtacttacttcatacttacaggtcaaacaggcaaagccacattagagtgatagggaataacatgatccatacttttatgcacggtagcaacatactttctttaacccgacaacccaggatgctagcataaagacagtaataaataccttgtaggcagctgtttgcataatacgttcctgcaaaaattgaaaactattctggcgacagattatctccagacatgcccatatatctgtcacatctctcgaagaactagtgagagtatctcttgcactgcttcgatcttgagttaacatcaaatgaactgcccatgcaagtcgcacaacaccaacaaatccttcaatagtcaaattgttatctgacctcatcacctgacatgttaacaatgaaagcatgcaatgagcatgtttttttccatatgttccaactaaacaaataataggaaagaactcattggaaatatagtcaggttgggcatctgtaaagattaccagctcatgaaaatcacgcctgaacgaagaatcggaagatgacaaagatggtttctcatgggaagtacttaaggcatcagaaacaaaagttactacaagagaaaaaagaacgccataggtgatctgcaacaataaatgatagtaagagttgtacaacaacaataaacaattcaaattataccaatagcatgtctacaaatgcaatttcaaagtcatttgttcaaacttcaaacctgaagctccacgctagaattttcattaacttcagctgcacagtcttttaacaatgaaaatacatccttaacctccctgggacctacataaagttcatcattagtgatggttctctatcactcagaaaaactatcaagcttcctatatttgaatttcagggaaaaatattgaaatgatggtcactcaagtcactaagcggacacatcagaaggtcaaatcaggtgatattagcaactatacagagcatttaacttactcatcaatttaataagtgcagaaagagcaaggcagtggctcaaacttaatctctcgcgagaaacaatggcacgcctctccacaagagcccctctgaaatcaagcacataatgctcagagcttggttggccaacaccagttgattcttcacgattaagttcctttatggggagaaaagttaaaaccgtcaatcttagtttcacccaaaaaaaaaagatgatatgaaacctttccatattcacagcacaataaattttcccaaatatgatacgccctttgttataagtgatgccgcagacatgacacagcttccaacaagagtgcaaatatgtcgaagaataataataaaagaaacactatggtatgttaaatgttcataaaaatctaggtacgaacctaaataaatataaataaatcaaagctaagaaagtttactagaagtcttataaaattgctatatatttttcagtgcttaatagttccaaagaagtgctgatggaacgtcataacttcagattgaactgcaaacatgatatgaatagaaaatgtcagaacagcaccaatatttgctagttccctacccacatcaattgcttcaactatttttaagcctacaagctagagttcaaatgcactctccagttttccacatttatcacaaaaataggttaagcccgtacattgcatctgtcaagagaagactccaaatctgcattagccttctcattgttactacagcattcgtgttcaacattgctcattaaataaaacatgaaagagagtacacaagctccatcaaatctaacctttactagtgtaattatacgctgcccgagaccctcaataaatagagcctccatttggttttgtatttcatacatcagatcagcatcaagcccttggtcaagtacaacagactgcagaagataaagagaactattaaatgcatcattcaaaactcagactagttaataactggaatgagcacgatcaatagactacccgtaacagaatgtacaaagaggttataagatcccttctctccatgtaccaaaggccagctgcgagcctatatatttccagtggctctcggccatatagaacccactataaaaccaccaccgcacaaatggtcaggtgaagtaaacatagatagtatagaattagagataactattatactgaaaagtgtacctccctgttggcgtcaactagcaatcgaacacactcaatctcattaagattgagttcatcactcaatttcagggcctgaaaaaatgtatatgagctttgacttgagtgaagaaaacaaaaggaagagccctcaaaataatgtcatttatctggggacaaatgatgatcaacaaataaatgataaatcacggggatctacattataggtgaaagtgtgcaaacaacagccatcccagatctgatccttcaatataaagaagcaaataatgggtgatgcaaccaaatggtaatgtttccacactagcatagcagacgtagtgcacatgtaaagacttgtcagaataggttcaagaattcaaacattgcactggatgggcagttgggcactaaggcttgttttctctagcatatatcttaagcataaaaagagtggtgtcataagccatgttgatgcttactgtatttgaagcacaacagtaatttctaacggttctttggttggccagtatcaattaaaaaaatcaacaagctctagtcttaattttacttcactgtgttaattagcatttgttttgagggaaataggcacctaaagcaagtagtgtcatatgcgatctcagttagtcgccttaagataaggtcacagctcaagagttcacaaatttgaacaattgtcctaccaaagatacatgtctgtcattgatacattgcataacaagctacctcccacccaaaaaatcacctccagaaacatatttgaccacaaagccaccagattttatagaaagcatttcattgtaaaactacaaagaaacaaaagcactaaatcaactgaatactcaggaagagataaaatcgcactatctcgcgggcaaaattacagctcatctcaacagacttgatactattttgcaactatgaccccacataggatctctaccagagactaatcaaaagtttcaagtttcgcccaacatcaggggtacataaatcacgtgatgctcaccttaagcagaagaattacgcatttctcacatgttccaagcataaccaggtaaatgcatagcgcatcacaccaaatggttggcgagggagcttaccgtctgcacgtcggtgtcatcgagcgttatgggaggcatgtccgggagccgcacttccttggcctccacctgagtccgatccgacgccttcggcccctaccaacacaaaccacagagacgcccaaaaacccaaaacaccccgaaatcaaaaccgagctcccggacgaacaccgaacgattcctaccgctaggggcggcgaggggctcaccgggtaggagaggagcgcgcggaatgcgggggcggcatcgcggacggcgtggaggagctccacgcgctgcgccggcgacggcggggatggcccgagcagcgccgcctcgacgacggccaggagctcgcgcggcgggggcggcggcggcatggccggggtggaggtcgctcgccggaaccctaggaggagaggtggcggagcaggtggtcggcggaacgggggagggaggggagatgggttttaaaaccctaggcgagctcgcggcgcggcttccgggtttttggggagctttgagttgaggccatcgtgagttgttccgcgcgaccaaattactaacagtggcaaataattaaaagctcccttataatgtgaccataaatctgtcgctctgacggctccgtccaaaatttgttgtcgtgatgttttatgagtttttttcctttaagttctttattttctttttagagggtttctgaattctgatgctacgagatccattggtgttttcaaaaattacaaaagtttgaactagtagaatctaaaacatcaatcataattaaaaataacacctaattatattatacactgaaaaagcgtgcgatctccataataggagtagcaatcggtgatgagactgtaggagaacaaacactatgtgaaaaaaataatgggaaaaggtagccataggctatatggagcatggaagaatgtgaaggagcgcatataagtatgtttggtttcgtacaacaagctttaccctatcctacaacatatggcaacatcttgtttagttccctttttttttgcgagacatgtctttaaacatacaaaatgaaggtttttgccttgcggaaatgaaattcaaatatgtttcaccagcctacatgatgtaagccaaaaaaggtaggcagtgtatgttgtctcgggacaaaacttattcgatacaagtgtatatccaaggaaaaaaacgtgggagcgaatttcaagctagggtttaaaaaattccctcgttggtcacacacctaagcataggtctagggcccggcctaaatcgcttgtcgttctcacatatgctacggtgtcgtttgtgtaagagtgggccaaaggttcggagcttttatctaacagcttgagaaggtctttttctttgcaaagtgcccgggcttacccctctcaagtcgagttttttttaactcatatataaccaaccgtcacagttgttgacgaaaaaatcaaacacactggcctgggagatctgcttaactcctgtgcaggtccaaaggttggtgagatgcgggcgtgccagtcagtttgatcctgcaactgacaagatatgcaaatagtagatcaaacagtcgatcagctgacaagccgacggagtagttccagccgatagccgataaatagccgatgccgataccagccgatagcgatagggtttaagcaatcggctatatgtccaatgtagataatgatataaagacaatcggttgatgatgatgtatataacaatatgatccaatataaaccaatcggcaaaaaatgatatgataaataagcatcgattcgaaggttaaagcatacatcagctggagatccgatgttataaaatccacaagattatattaaacaattaaatctttattgcgatcggctaaatccaatatgtatacaatccttgtaagccgatgcaacgcctagataactcatcggctgaaaccccgatgaaacccttattggcagtcaaaaaacaggctagagattatggttctaagcacgaattagtagatcaaacttaactgatgcagcactaagtatgaaaagaaacacaatatctagacaaccaagctgttgactgattttcagggtggtagatgcctaagctaatctaatctagcaaggtgatttagccgataccggtagaaaccctaaagcgagagacagccgatagagctaaattgagatgctaggactagattaacatagacatatgataaatagccaggcaaatatattatccaaaccagagtaatccgagaggtcgaatgtactgatgcagccttgaacgacgccgacgtagatgatacaattgcctggaccggtggaacattggacttatcccttcgccggagatcgaagacgatgcagccccgcgtcgggttccaaattccgccggaacgtaaaaacaaaagtagaagtaaaaagggtcgcgatgcgccaaattgtattgatcgtagcgatagattacatagaccccgggtgtacatatacccatgggtataaaaatccttgtcggataagaaagaaaccttcctaaaaataaaaggaaaagataaagtcttataggacactaaacacactttcctaaagataaaaggaaactaacaaactattcctaattaatagataacttgccatactgcattctctttgaactcagtctcttctggataagcttcctttagtagatcaatttccttaactgaatatagcaagaatctgacaactgacgacttgaaaactctcatcggctaatctcaggacgtcgaagccaacgctgactctaagccgatgactattccgggcttatcgaatttcactgttaacaacagtatgggtataaaattaggatgagtttggtgaaacggctaactcggaactaaaggcatccttagtgacgatgagccggtaacaatacatgacaacacatatagcataaaaaaacagcataatagttaattacctttgaagttaaaggttgatgtatacgtcaccttatagcgtgtagttgcgttggatcatgacaacgagaaaaaattgtgccaaaggcgaatctttggtggcatgaggatgaaataagttctaagttattgcatcatcgccttttcgatcttatggtcccataataattttacatagagttgtgtgctactcattcgtgtattcatacaaataggtccatcatgtgttcatcacattatatcaataacacttgaatttaacataacaatccatcactcataaaatcaatccatcctctataagcattcgaaggaaagacaagtataagtgttgagtgagttggagtgatgatggtccttgtcagattctatcatcgtagtggcataaatgtatgcaatacccaaagtttcaagtgagaaaagaacaaatctcacattttgagcagtggcatatccactgtgtgggttttgtcaaccgtaccactaatagtttttctataccaacactagttaaagactacgatcgaaatcctggtgataactatagctcctaatctaatggtcggttgctcgttactagtccaaagggatatttttttatcagttacgtcttattttcttacaatattactatttatcatttcacttcagaaggggaaaaaaactcgccttcaattttgaaattgtatcacagaaaatgagagtttttatttttccattgtctgttaagaccttgtaaccagctgaatatcatcttgctaggataccgatactcttcttattttttttatcgaaaccactctttgagacctgtgtggccatacacaagattacctagatggtgacaaccgatgtgcgatatttgtccgcacaattcattcacatatatacattctgacatagagtctgcatggattcacgaaaccaaatcaccttccaaaaccgctatgaagtccgttccctctgcttttcacgaaaaccatcttaaaaaccattgactagccgtgaaattcaattaacttttaccaaaactttaaaatctagttaaactcttttttcctagctcgaccaatttactgagcggttttgtgatctcaacccaacaaaaaaacctatttaagtttccgcgaaaaccaagtggtttcgtaataaaccatctgcgcacacgcacagaagcccacaaccttccccgcgcgcgagtaccagcctcgtcgccgggcaacccaaacgtgcccccgcgcgtgcgcgcgcggctccgtgctccgctctccagccacctatctattctagccccttacgttacggccttttacgttactacgtacagctaatctaccagctccgctttccatgaacaccgccaaaaagcccaaaacctcccttgctctttgcagctcatgctctttctttctttgcccgacgccaaattgccaatgcttcgattcacgccttccattccattccatcccagcctcctaacaaccagtagcacattgcttgcatgcctaccttcgaaaatcgcagagcacatgaatgcacctgcccaggaccacggccactgtccgtttcttcctcctcgagaaggagcaactgatcgaactgcgcacgcacgcagtagctagcatcgcatcgcccgtttctgttgcgagaaagaagcaagcaaagcaaagcgaagcgctgatcatgcgcggcacggcgcagcctgcggattcagtggcatcgtgcagccggtattgcagatgagacaagccgggagatggatgccgttggtggagtgcccggcggggagcggggcttgctagctgtgtggggggcttttcgtcgcgaggagtgcacgccaccgtgcaggtggtggacgggacggaatggctataaaatgggggcgccattgccaagaatcccaagaacaccagccaggaatcagaagccagaagcagcaacgctcgctctgattctttctttcctcctcgagctaggtgcgtagttgtcatatttgatcgatcggttttagttcttcttgtttaattttgattgcgcttgtagcagcaggaagtagttttaattttggtgtgatcgatggcggcgatgatggcggtgacgacgatggtgacgaggaacaacgccgtcggcggcggcgcggtggcggtggtggacaggaaggggtggttcgtcccggaggtgtcgttcccgtggagctcggtggaaggggagtgcatcaacagcagcagcaagaggttggagttccctcgccggacggctgcgccgccgctgttcgccagcgtcgggctcagcttgccgtctgcggcgaagggccgggacaactgcgacgtcgcgcggcagctcgccgccgcggaggccgaggaggcggcggggaagaagaggcagggcaggaagatgaagggcggcggcgggctgctgtcgctgaggaaggtgagggtgaagatcgggaacccgcaccttcgccggctggtgagcggcgccatcgccggcgccgtgtcgcgcaccttcgtggcgccgctggagaccatccgcacccacctcatggtcggcagctgcggcgccggctccatggccgaggtcttccgctggatcatgcgcaccgagggctggaccggcctcttccgcggcaacgccgtcaacgtcctccgcgtcgcccccagcaaggccatcgaggcaaccaactcaacctcacaccctccactttgtttttctttgaatttctcgtgatcgaatccatggcgtcctgcagcatttcacctacgacacggccaagaagtacctcaccccggaggacggcgagcctgccaagatccccatccccgtccccctcgtcgccggcgccctcgccggtgtcgcctccaccctctgcacctaccccatggagctcgtcaagacccgcctcaccatcgaggtaaacacaaacacacacaaacccccatcaaaaccttcaaaatcgatcaaactaatcacgaaagtggatttttttccccctccagatgacatcccctagttttgtgtatgcgattcaatacatgatatatcttttgcaaatatgcaagttaaaattcaacttatacaattcgaaacaaaaataacaaatttgacccataaattacgcgttctactcgtacaagttaaatttaaatttgcatgtttgtgaagtgacatatctctattctactaaaattttttaatgatcttttaagtgacatgtaaaaatgaggagatatcccaaattgagttttccaactaatcaccaccgccattgttgcgttttcttgcagaaggacgtgtacgacaacgtgctgcacgcgttcgtgaagatcgtgcgggagggcgggccgggggagctgtaccgcggcctggcgccgagcctgatcggcgtggtgccctacgcggccaccaacttctacgcctacgagacgctgcgccgcctgtaccgccgcgccacggggcgcgccgacgtcggcccggccgcgacgctgctcatcgggtcggcggcgggcgccatcgccagcacggccaccttcccgctcgaggtcgcccgcaagcagatgcaggtcggcgccgtcggcggccggcaggtgtaccgccacgtgctccacgccatgtactgcatcctccgcggcgagggcgccgcgggcctctaccgcggcctcggccccagctgcatcaagctcatgcccgccgccggcatctccttcatgtgctacgaggcgctcaagaaggtactcgtcgaggaggaggcggcgccggagctggaggcggagtgcgcggaggagatcaaggagaaggttgcgtgaagtggtttgggctcgccggcgccggagaagatggtggctgattgtgcatgggtgtgatgatggaagcatgcaagaaaagaagaaaaaaaagaagcaaaaaatggagagaagtttgtggttgctgtggtttgaagttggatgaatcatcgtaggattcgatttcctctgttcaggaggcatatggtgtgttttcaatgaagtgatgcatttcaagtttgttttcaatatatctatgtattgcatttcaagtttgttttcaataaaatctatgtatttccagttcaatttagttcaactagcatgatggcccgcgcagattgcgcggctagcatcattatattttctctcatataatagcatatatgttttctcattatattattcaaatatattaaaatgacaacataattttaaattttgcaataactttacaaaactactaatgtgtaatattcatattgcattttatatacgtgttagttattaattatttttaagataaaattttagttatttgtaaattatatatattcatatatggactctagactcgtcttttaatatttcttttttctgtaaattgtatttctatatagactatatgttcttcttctaatattatttatttttatttctgaaattttattatttctaattgtatttctatgtggactctaaactcatctttcaatattatttaatttttaatttcgaattttagttacttctaaattgtattcctatattagcattaaactcttcttcccattttttcttaatttcgaattttaactatttgtaaattgtatttttatacggactctaaactctacttttaattttattatgtttattccaaattttattatggactctatactctacttctaatattccttatttttaattccgaatttcagttatttcctaattgtatttctacatggactctatactctacttctaatattccttatttttaattccgaatttcagttatttcctaattgtatttctatatggactccggtctcctcttctaatattccttattttttaattccgaatttcagctatttcctaattgtatttctatatggactccggtctcctcttctaatattccttattttttaattccgaatttaagctatttctaaattgtatttctatatggactctgctttttctttttctccgattaatgtgagaatttctaggccatgagagcgaatgtggaggctcctttttctattcctttaattatataatagatttcaactttttagaccgatgtacctgcgatgtattggatggtattctgcatttggagatgggtttgttgtgatttggatttctctaccaaatgtttcaatttaatttaagtatttgcagatgggtttatgtgtctgatgaattaaggccctgtttgtttcagcttaagacctgtttgtttcaatttaagattattataatctagattattaaatctagattactctaagctggattataataagctgacataaaataagctacgagttgtttatttttctggattattagaggcatataagggtagtgggtctttagccactcaataatctagaaaaagcatctctagaggagattattatattatagtaatatggcttatagattataataatctagcataataatctactggtttgtttcagcttacagtttcatcttactcataataatccagattataataattctaaactgaatcaaacagggccctaagtttcgttcccagcacatgatttcactatctggagatgcagctgtgatgcatctgatccctgtatttccagtttgatttcacttttagcgcatgatggagagaagcatccatcaactacacaaagaacaagacttttaaagcaattagacatcttccaaatgtaaattggggcaaatcaagatgagcaccgtactcatacaccttcactgtcataagttggcatcaaaacttaaccaatcaagtaaaagcacaccaaataagctgtgccactaattgattacacaagcccttgatgtatcaaggagttccaaatacaacacctagcagcagaatactaaaattaaagctacaacaggaagctttttggcttctaatattagctttgctcctcggcctcagcctccgctgccgcggcctccctctcttccgcggctgctgccatcagttcgtcaaatttgtccgtcttgcccagcactatttcaatctggccaagacaatcataggatttcaggaaacgctcacttatacatctggaaaaagtaaagatctacgttaaacatgggaagaacattaaccttggctttctgcatagggcgactcctcgaatcatctttgacgtcaacagtagatgtcataatctctgcacaaattttggagtaagctacgagaacagaaggaggatgcaatcaagttatcaattatgagaaacaagactcactcttctcgacagcaaggccattatttttcagaatttcagcaacagtcaccacagttgcaatagctgtcagggagaaagttaacaggtaaggagagcataaaggaattcatgtatatgaacaaagcataagtccaagggggagaaaagggaaagcacaacgaaccaagttcacgtcaacactttgtccgaaacattaaaatacagaaaatgtttcacgccaacattaaggcttttttatatataaatggtatactaaaatcaatgtgaattgcaatccttcggtgccaaaaacatgccatagcataagtaacttatcactttgccttattcaagtagaccagacaatcgtaaattgcaacaagaagctacaagggagggcaaaaaaaaaaataatggtgaacatgacattggtagtttcggatttggtcaaaggatcaacacagatcatttttttacagaaacaaaaaattgctatgattttgcttgttaagaacaaaaatactgacgattgggcacattattccatccgggaagcctaggcagagtaaccccaagaatttctactgttataaaagaaaatactgatccattggtcaataatttgatgcttttagtaatacagacactatctatctatctatctatacttctcaagctagttggtttccataatagaaaagcctgcaaaattcctacatttgaaagacctctaaaaatacgaacagttataaattagcaatcacccaccaatttgcaggtgtttctataaccaaaaggtaattctgatctacatttcaactaatcactaatgaagtagcttagtgagattaaatcaacagaacaggtgcgcctaaatcaataaacatgaaaagcatccggaggaaagcacatacccatgccgagtgccgagagctccacttcgttatgcagctgcatgtacctctgcaacaaagcaaacatcaagcaccaaattagctatctccgtttcaaatccagccaaatccgcagccatgagccctaccgcaagcggggtttatctagggtttagataaaccccacggagagcagagcaaaaacccattccaaatatacaccctcataagccaagaaacgcaacaaatcaaaatccccacgaaacaaggcgcttttcttctcgcctctcgattaatctttctcccccacttaccttggcgaggttgacgtagaagaagagcggcttcttggtgttggagacctggatgcggttcttcttgtgcgcctccgccgcgccgccgcccgccccggcggcttctcccgcggctatggtgaggttgccgaccgcctccgtcacctcctccatggccgccgcccgacgagtccccgcggagcaccgtgcgcgagtgaaacggagagcgcgaggcggcgaagaagatgtggaggatttcggcggcgacggaggtaagagggaggggggagagccctatcgcccgcgtgtgtgggattttatacggggtagggttacggtttggaggctttcggtttttccccatttctgttttcggaatcaactcagctctgtactctcccccccccccccccccccccccgtcccaaaatctaacctcatttattttttaatagagtagtaatgctatatttgtgattatttttagtcttgtcgacactcttatataattcaagtgtatatctttacgcatattaaatacatttacgtggcaccactaatcatatcttactgtaaaattgatactcactaacttataaagtttaacatgcaagtatattacatcagcatccatccctccaccacatcattgtactgcccattaatgctcctattcatctacaacaaagtctcccactatgtcctccctaaaatatcatgactgcttgatgatttgtgataaagaggagtctttcaagttaaaggttaaagaaagaagaatgataactagaatgaaagaggaggaaaaggcaatataataataaaaaaagacaataaagggtcaaataaaagaataagtagtaagaactagttagtatagattcttatcccgtgtggttatggctcatgtgttggattcaactccagtgggtaaaacagtccaaagtaactacgtggaggccaaaacatcaagatttttcatgtaatgggtctaaggccaatgattgcaagttgcatataacaccttgtatttctcaaaccaggaatcaaatatctcccgaaacaatggatctacgttagagtatatttctttttattagcaagtgcacaactagaacatctttaaaatatggtccaattgtttgatctacagttaataagccatagtttatgggcacaaaatttatatttatgttattggaggtttaaagaaagataaaactacgataaaatcttgaaatgacattagtaagacaacaagcaaacaatgaggagcgcatactctctttttatatcaaaaaattgagtgcttattgtcttgtgtaaatgacatattgggccaactaagagcatcttcaaatctcattctccaaatgcctattcggtcagtttgacaaaccaaatggtagtctaatttacatttcaccccaacaacctctattacactatccaaactaaaagtgggtcccacctgccagcctctttactatttcaccccttctccttcacccctcctctctctcttccttttctctgtcgcaccaccggctgaatccgcgcagggctggtggtggtggaggccgtgcgggggtgggggagtggaggtcactgccaccgtcctcattgtctcgggcataggcggtggaggccgcacgtggatgggctagtgacgaagcgatggcgcggattcgggcgaatggcggcgacgtggattcgggaggacgatgacgacgcggtttcgggcgaatggttaacgcgagacctcctgctcgtgtccgcaagggcagtggcaacgataggccgacgaacagcaatggtggtcctgtagggcgtgctgcttcttctccgacttctcctaaggggcaccgccgcctctagagatctcgctgttggcttgccagtctgagtggaccgggtcccttgcctccatcgggtcgttggagatctcaccatcatcgagcttctgctaccggacactggctctccccctcggccacgctgctcccgaatgaaggaaaaatgaataggaggtggtgggacccatggatggcaagtaggatggccaagtttggcaagtgaaggaagaagtcgatcatcggatggcttggagtgggatggagatgccgttggagtgtaatttttgttcaaagttgctaaaattttgatttggagagtgggatggagaggatgttggagatggcctaagtttcacgctactcccgaacgaaggaaaagtgaataagaggtggtgggacccatggatagcaaataggctagccaagtttggcatgtgaaggaagaagtttgatcatctggatggcttagagagtgggatggagatgttgttggagtgtaattttcattcaagttgctaaattttggtttggtgagtaggatgaagaggctgttagagatgctctaagtttcaccaggctaaaataggagaaccagatgatataagagctccttccgaccgcaaaatatttactgggttttaataggaatcatctcaatttccgtaagattttaaaaggtcctacattacaaagaggcctaattttgggggtttctcaggataatccttagagataaaaaggattcataatagtccttagccgtgacagtacttgacaaacggaaaaagtccagttttttcatgtatgcttgaatttaaacacttttctgacacaccggggaataattaagggacatgtaacaggttataccagtagacagttggggagaaaaagtgaaaaaacaaagtaacgaactctataaggactggtacgataaaaatcctttgtagagaaaggggatcaactcaagtctaccttttcaaggagttgggccagatatcaaaatttacatagtgcttggattcaattacatgattacagttgagaatctgacgttctacctgtatagtgtgtatgacaaacgcatgtcaacatagagcaatgccgaagtgaagcaaatcatttcgaaggtggtcattgctggatttgctttggttgttcttgctgcttttcataatccccaagcctcttcagccatcgcaaaccgagatcacatccagcttcagctgcaatttgaaactgctcctttgctagcttcactggatcctgctgtatgggcctttttcgcatctttccagttgatggactcttacctgagttgaacctggtaataacctcaggcacttcagcacctgaacaatcacaaaatgaatgagcttcgggataatactattaacattaactttcatagaatcagctaacaagtttttaatggtgggatacatagcttcaccgccagctttagagagccaaatgaccaatattccacaacaaatagttatatgtgatttgctccttagtcatgacgcactagagggttacttttgtacaaaccttttaatagaagtgatccatatgcaattgcagctccagagtgtccctgcaggtggtgagcagaacaaagaaaatcaagtttgagttgatattctattcacaagcaagtccaagagaaatccctaccttttctgatgctctgtggaaacaccacattgctgaagctatatccctcttaacacagtctccagttaaatatacagcacctagaagatacaaagcaccagggtgcaactgcaatcaagcattaagtgtaattgagaagattcagcaagaagcatacatggaaagatgtgttcaaaattcagagaagcaaacctggtcaacagctttctcaatgtaataaaaagcctgttggtcagagtgaacgtagtcattctacaagagaaacaaaggtaaaccatcaattaaagtaatgcaatgtctgtgtgaatcaatctgtataatgaattgctcaatagcataacataaaactgcatgatttaatcaattaagtggaagggaaaagtgcgaacagagcatgaaaacctcaattctcaaatggcatccaagttcatactgtgcatctggatcacccatgtttgcagcttcaaccaacagagcagcaccactgcacccatgaaaagtgaagagagaattgactatcgaaagatacgtgtgcaaatctatcaacagtaagttctgtgcttgcagcaaattaaataatgttcaacgagaagtcctagagagagaattcctctagaacttaactacctacctgagctgatccatgcagcacacttactaactatttttgttaagtcaagatgctaatctcaaatattttgtaacccagtttttgccagctttaactgctgtggtagtgaactttgatgcagtcaattggatgtgcacccaataatgagtaaatgagaaacacattaaacggaaaatacatgtcagcatcttttctttgggagccatatcaactcctacagattacataaaaaaagaaaacaacacctactgacatgttcaatttgtgtgggctcttatagaaggaagcagtggcggagccagggccggctaccatgggcaaatggcctaggctccaccaggagcatgcagcaattcaccaattgattaatgcctaataaccttgcttagtcactggcaaggccgtatgaagaaacagcacagcagaaaacatgcttaacacaaacttatactgcaaatgctcacgctaaaatggtatatgaattatatagacttgtatatacttcatttgttgttagtcttgcccaggctcatgataaaattttaaacccgccactggaaggaactacctaaacttaaaaataattcttcaattacctcaaaacaacaatacttaaaaataattcttcaattacctcaaaacaacaatagaagcagtgactaagctagcttttgcaatgtgcttgcaggttcttggaataagaatgaataggaaataagaaaatgaccacgatgcaacttgtaagacataatagcaaagaaagctgtgcaatactaacattgccagaagtgaaagttaacccacatggccttacaagctccaggaacatgatacttgaaatgcatcttggcaagccataatctcgcatgagtgttcatattgtcgatctccagagccagctcaaaattttcctttgcaccctaatgcatagcatcgagaagatttacacaacagaacgtaaaaaaaaaacattggtccaaaccaatagctgacgcactacactatatgcaggtggtgtgcaacttgtaaagattagcaagacagttcggcacagaatatctccagacttcaattggcaatggcaagaaccaattggtacttggtacacattggcaaatgaacgattggaaataataaaggtccaaacaatcgggttagctggttaagtaccattcaacactgcaacacaaagtttcatttcctagacttagggcttaattctagggcacttagactatcgtgaataaatggagcaaatgacaaagacgaatcatccagagctgtaccctgagaagtgggatcaggcgcttgtcgttgcggtcggcgtagtcgatgacgcgatcaacctcctgcagggcgctccaccccttggccaccaactccatcgccttcttgttccggtcatggatccacctctacaaagcataatcacgtacagaaaaaaatcacccattatatcgtcaaatccatcaccgaacgcccgagctacaacgccaaaaaaaaaaaaaccccgctaggttttgcagcattcccgattgggggagatgagattgaaaccaaaaaagatggccaaatccaagccgtgccatttgacgcccagcctcacctgcggattcagcgcgtgggcgagctggttggcgagcctggaatgggaggacgacgcggcggcggcggccgccacccgccgagccgacgccgcgagcatcgcgggcggtgcccctccccttcctccgcaaaccccggctgagctgcgccgccgctagggtttgtgcttcggttctcttccccaactgctcggaggcgggcgaggcagctcagtccgtggaagccgcagacactggcaggtggggcccagtgtcagactgagaaatgaagctggatctgtaggccaggccttagcataggcccagcttccgatgtgaaaactaggcccggttttacaggccggattcacagaaggccctactcgtaaaagaaagtctaaaaatcaaaagcacatatgccgaaattttaaggaacttttgcgaaattacaggtgaattttcagtacatgtgtcggaagcaaaaggttcacaaaaccgacagtaactgctcggttttcgaccttatcaacagggcgcgtattggtataattcgatgggattcagcagaattggtaaaattcgacgaaattcaggtggttacaagctaactctgcttacacacttgcatttacaggcaagtacaaacacatggctaaggagtagtacaaatgtagtccgtacgatgccactcctactcaaatggtgtaatccgaccactccagcatgaaggaggcatggtccatggattcaccggccggcgcgccgccgcgctggtccccgccgagcagcagcctcgccgggttccccaccgccgtggcccccggcggcacgtcggcgagcaccagcgacccggccccgatcttggcgccggcgccgatcctgacgttcccgaggatggtcgcgccggcgccgatgagcacgccgtcgccgaccttggggtgccggtcgccgacggcctcgccggtcccgcccagcgtgacgtggtggaggatggacacgccgtcgccgacgacggcggtctcgccgatgaccaccccggtggcgtggtccaggaggacgccgctccccacggcggcggccgggtggatgtcgacggcgaagacctcggcgacgcgggactggagcgcgagcgccagggcgcggcggccctgcgcccagagcgcgtgcgcgacgcggtgggcctggacggcgaggaagcccttgtagtcgaggaggcagtgggagaggcggcccgcgcaggccgggtcgcgggcgcccgcggctaggaggtcggcggcggcggcggcgcggaggtcggggcgcgcggcgtgggcggcggcgaagaggtcgtagaggagcgtggaggagagcagcgtggaggaggaggcgagcttgttggcgaggtggaaggcgagggagccggcgagggtggggtgggagagcacggtggcgtacacgaacgacgccagcgccggctcgccgtcggcgtcgcggcgcgcctcggccttgatctgggaccacacccgcgactcctcctcctcgtcgtcggcgtcggcgtccggctccggcggggacgggtcatgctcgtgctggagtggctgggcggtggtcatcgctgaagtctcgtcgtcgtcggccggtgacgtcgacgccggtgaggtcgccgtcgccgggcgggacgcgcgcgggaagagcgaataaataggcgtggagacggacacgtcagccaaccaatcagagctcgaagctggtgtggtgtggtgtacacgatgacgtggcacacggacacgcttcgaccaagtgatccaacggcgcgagctgcacctaggctgagggcacgcagcggcagactctggtcaacagcgaccttgatagccaacagaaactaacggatttggatccggtgcaacacctagtgtgagcagtcacactaggaacttttgatgcaaatccaagggtctagaatctacaaagtactgttcacatctgaaaaaaactgcagaactactgtagcagcagcactatagcatcagatctagaccgttcactggaaaaatggatgactgagatgatgtgcagttcctaactcgcagccacagttaggactgcagtggatctcaattcgaaactaacacattgcacattttggaagataaataaatactctctcagatttttttaataaatgacaccgttgacttttttcaaaagtcacatgtttgaccatttgtggtattcaaaaaatttacgtaattacaatttattttgttgtgagttgttttatcacttaaagtcttttaagcatgatttgcataaaatttttaagtaaaacgaatgatgaaactgaaacgtatgtttaaaactcaatgacatcacctattaaaaaaccgagggagtactgtatataggcagaaaggcaacagagaaccagaatactattttcattgtgcagagctactcctaaacaagttactgctcctacgcacttgttccttacatgtactcttcgtcctaaaatataacatatcggacatttttagaactatcctacgctgctatattttgagtgcatttctagcggatcaccaaattaagcacagcagttcaaacgcagatggcgaaacaacatcggcaaatcaccgaactagagttttatggactctgcctcgctttggacgaagacggaagtggtaggaagttaactccaagtagatggagagctgatgatatgcccagaattatgtatgattcatccctgaacaaagaggagaaaaagttaagagaactacagcaactagagaattggatgccctctatctatgatgagaccaacatgattctctttgaattttttttcctttttggagtagtgcctcacacagttaagaactgagatttgaatttaacataaacagaaaataacagttgattgtaggtgcctctccttctagcagtgcatttccattttcctccttgagaacacttttttctagtatttttgcaggttaggcggttaggccccttcgctgtacattgattctgaatggcctaaactttctgccattgcaccattgcaaaaaccagaagattgaccggtatcatttccatttccatttaagtttatgtgactaagtaaattttctacttcacatgtcaacttatctaccccactttccaaaaactgaagcgccttttctgacatcgaatatcttagagcaactgagtgcatcttttgagatatacgcgcacatcttaacatcgaacttccattgccgctttgggaattgtttctgcagccaaatagtccggcttttgcatattttgtccaccttttgtaaacatagtgtgaggggaatgtaaaaatattgctgtagttaaggactcgcagcgcgtgcttgcatagcatacctacaaaaacatgcaatctccgattatagcaagaaaatcaaacttttacgttttggaaacataaccaatatggtagcatacctgtgcactcatacatcctgcaagaacatgatactgttgtatcctcagaattaaaaacaacatatgcttcttcttcagaatttaaaggtgtcaatttgtaagtactgattgttctgtcttgtgatagcaacgaacaagacagagtgaacaattttttgaattcttcttcaaaatgcgaatacaaattccttgtataggactcagcagccgtcttcaacataggcaaatcaggaacatagggaaccggactggtttgacgggaattataatctgcttctagttcattttggcggaaactagttatgcacttctcatactcctctaagaattctggaaggcagagtttcctccgaaaattcttcaatgcatcacttgtgccttcagcattttggattgtcatcatgtcagcgtaaaatgagtcacgggaatacacagcagcccacttttcacgcattgcatataaattattcatccaatcattgccgtctagattatatgcgttaaccaattccttccacttcaagtcaaagaacgttacagacctttcttcatagatacgtctcttaaaatcagatagaaattctggatggttgcaaattacgtgattcaaatgcttaacagcattatgacagatatgccgcaaacacaggcggtgacttgagtttggaaacactaacctaacagactttattatttcagcagagggatctgtgaaaattgttgccggttgcttcccagacattgccgtaaggaaggtttgaaacagccaattgaaagactctgaagattcatcatatatcagcgaagctccaaacaaaatgggttgtttgtgatggttagtccccacaaatggagcaaacggcatttcaaacttgtttgtttcaaatgttgtatcaaaagacacgacatcaccaaaacaagcataatccacaatagcttgacaatctgtccagaagaagtttgctattcgaccatcatcattcagctgaactgcataaaaaaatgaaggattttctgtttgtttgttcttcaaatactcaagcaatttctgtgcataacttggttggaggtactttctctgagtatctttcttcagaagatgcacattttcagctcccctggaccattgccgaaatactctttgcatatcagctgctgtaataccttcttgccgcatttcattcactatctgttgatatgacggtgtcaaacggcgctgggaccttaacatgtgtgacttatcaggacttacgagatagtgcttatgatcgagctcaaccttctgcactgtccagataccttctcgggaaatatagaactgaagacgagccttgcaatcagatcttgttgaagaacgtttcttccgccccggctgggtagtgcttgccaccggctgcccttcattgctgcacaggaaatatttggagcaaagactcccatccgccctagtatttgcgtggttcttccggatactaaacccaacatttctagcataggagttgtagaaatcataagcttcgttctctgaattaaaggtcatccccacttttggcacacagttaggtaaaccaccttgatcatgatcctacacaacatggatggtaaaataaaaataagaaagatgttcactttagggacaacaaaaatactaacaatgttcaaactgtcaaggaataatttggtttggtgacaccgaaagatcaaattcgtgtatattgaacatagaaatatccaggtacacgtgtccacttatttttttaataaaatacttcatccgtttcacaatataagactttctagcattgtccacgatttatatgaacgtgaacaatgctagaaagtcttacaatatgaaacggagaaagtacataattgctgcaagcaaaatcattctactgctatacctcaaatgaacaatgagcaatatcaagaggacatcaaaatcaagccaaaccaaaggtcattaccccaagctgaggagtcaccgcggggggcagcccgctagcggagggctcacgaccgccggcgggcaccgacgaggagggcgccggcggatcgctagcggcggcggaaacggggagcgggccagagccaggggagggctcgcagggcccttgagccgtccaggcgaggggaacgacggggccggacatcgccgccggcccactcgcggtcgggggcgcaacgtcgccggcggcgagcggtttagggcacgggcggagagggaaatcctgcggacgccgactcgcttcgccccatggcgtggcgcggttgttcacttccgctcctccgtcaaatgggccgaatgagttggtgtgctgggaagatattgtgcctgagataagagcaagtttaatagtatagcctaccatgggctccaaatcatctgcaggcgatttaatagccaattcatataatagttacatataaatatatactacataattaatatctggttccatctgtcatacacacatacatcttgagtccgtgctgcaactgactataaatctgtagcccgttgcttatctctctcatcttttatcttctcgaaatgtgtttatagatggcttatagtctactattgtacctgctctaataaggatagatgagaacccaacaatgtatataaatacagtacatgtaactagaatattacttgtatgcaatttttaaaaatcccaacggtatcatgctatttccacgaatcggaggtcgtgggaccgaatcccttcacctatatgcatgttgtgattttctcttccttatttgcacgaatcatgaagcaaatccaactattcaaaatcacacgaaagttacataaaagtcacggtgtaattgtataaaagttacactacgattatactgtaatatttaggacagaatttatcgataaatatatagcaaaatcgaaacttatttggattacacaagaaaattgaaacaacttttaggtttctagactgtaaaattaatatagttcttgtttatagggaagagcgcgtgtgcgtttatacaagcattttacgtctgtgcttaaaaaaaaaagctcttataatttgtatggtggtactagcagttgacattctctcaaatttaaaatccgagggagtattttttttaattacatgacggatacacaccactgcacatgcaaaattacactcatactccgcatatgcacttaggggtgaaaatggtcggaatcgtaccatctctttggaaacgacatttgatttaaccggtaattgatcataattatcatttaaactactcaatatcgacatcactatgatttagaaagaaattagaaaaaacaaaatttatatatagccaaaaagggtaatggtcgaaaacggcgctcggtcgattgggaatttccgtgaccattttcacccctatccgctaacacacggatttaaatcctagttggtggagtcatgcacccacgatttcaccatcatatcatcccccaagggagtatttttgttaatggttagaacatttcgtgcagtcattttcgcacttctagaatactagccgtcgagacgtcgacggtgatatgatatcatatgatcctacgaaaaatcatccatagaagagtttcttcctcgtcatgtgtcagtcgcattcactgcgtggtcatggactgcaactgacttggaacatcttgtcaggtcaggagcacattcacaaacttgcctagtctttccttgacgattcagcaacaacgacccaaaagaaacccagatcttttcatgattatttcaccggacaactcccatttctgtacgaactgtacaccgatcaaagttcaagaaaccccaaaaaaaaagagaaaaaatactgtacattaatcggatcatgctttggagttcttcagctcagatgtatttgccacaatagaatgtgcagagaacacgaaaaaaaagaaaaatctgatttctgaacgttgatgagagcagcagaatcgatcactgtgtgaatgtgaagcttaggcctcgaggacttggcaatggaggacgcggttcttggcgcggccgcggccgccggcgatggcggagaggagattcgcgacgaacgccttcatctgccccttgccgacgaccgtctcccaccgcgggcttgcggcggcgacgtcgacgacggagacgctcatgtcgttccggacgacgcagagcttcccgtggagggcgaccatggcggccgcctccaccgcgtgggagctccccgcgtgctgcccgccgtcgacgcggccgctccacgcgccggcggcctcgtcgtaggcgcgcaggcggcacccgtccttgcagtcggcggcgtagaggcggccgccgagcgacgcgctcgggctcctccacccggtcaccatggcatcgagctcgtgcgccgccgaccacgcgtccgcctccggcgagtacacctggctcatcacctgccgctgcgcgcccagccccttcacgtaccacctcccgccgtgcaccgcgctgacgaacggcatcagcgacgccgccatgtcggacacgaacgaccaccggttcttggccgggtcgaacacctccaccgacctgaggccaccaccaccaccgccgccaacgccgcaaccctcgccgccggcgacgtacaggcggttgcccatcacgcagcacccgaagccgtgccggcgccgcagcatgtccggcgcgcggtgccaccggttgctccgggcgctgtagaacaccacccgccgcatcggcccccggcgcgggtcgctgccgccgagcaggtagaggtggcagccgccgagcacggcgcagccgaacccggcggcgccggcgtactcccccggaacgggcggcagcgcgcgccacgccagccgcgccgggtcgagcacgtcccacgacacgcgcccctcgccgtcgcgcttgacggcgtacacccactgctcggcgaggcccagccgccgccggaggccgtagaagtagttgccggcgagcagccgggaccacctcctgcacaccagcctcagcttccagtgatcacctcgcggcacgcggatgaggcacgccacggcgaggtcgtcggggagacccgggatgagcgggcactgccggccgccgccgccaccggcgccgccgccgccgcggtggtcgcgccccggcgatctcttgggcttgagcgggtggatggacgccctgaggctcggctgcgcgcacgccttcgccctcggcatcagcctcgccgcggcggcgccggcgaccgatctctccactctgcacaagcatgctgagctatcaacctatatccaatcacaaacacaagcaaaagagagtttcaggtagctgaacaaaatatcacaattttgcattttgtatgcaagtttgtagtgcaaaaatgccgcgtaaatcttctgcgtgttcgaaaaagaaaaaaaaaacaatgtgaggtaggcaaaatgtttttcacacaatggatgtgtgtgttataatttttgtgccatttggggattttttttttttttggttttggtacagtcatacaaacctggtaatttgtttacataatttacattttgcaatcacaacttcacaagacaagaaaaggagttcgggtagctacacaaatattgcaattttgcatgcaaatttgtagtgcaacaatgtcgcgtataatcttttgcgtgtttggaaagaaaaaaaacaatgtgaggtaggcaaaatgtttttcaggcaatggatgcgtatgtgtcataattttggttattttcggggatgaaaaatcctggtttttatttcttaaaagtgactgctaattggtgaatgatacctagaatgatgagacaagaacataagacagacaatggtgtcatgaaacaacagctacttacagaaacagttgaactaccctgtgggggaccatgtctcttgttgtttcaatttctaaccttctaataaatgattagcactcccaactattcccaaatctagtgttaccatcctgctaattttggagtttgcacggctaattgaagagattttcccttgaagaaaaagaaagttgctttgatacaatcatgcaaacccagtaatttgttgacctaattaatttacaatttgaagtatgaaatggattttcctatccacaaacagttcaggttctttcaatatgcagtgctctgaggaactctatgtgaactgatcaaccaaaacaacttcacagttcacactgatgagcacaaggcatggtgtatcttctattcttctaacacaaaaacaccagccaagcaagctgaaaaattcagtccaacacagagccatgaaaccctctaaaatttctgaccaaaaaaatcaatcctaggatggcacatccatgcagaaacatgcaacaatttcatggagaaaaacacaaaacaaatacagagaagaaaaaaaaaagaaagtaagactactcaccggaggagcttggttccttctgtccatggcctgtccctgaagcaaagtatcaagaaaccacagcagcaagaacaactactcaccaccaatcacccagatatatatatacataatcacaccaaaatcatcaccatgcttctacagctccaacacccattgcacatgattcatgaacagaagagggtaagagaactgcaaaacctcccaaccagaagcctctcctttatgctggttgatcatcaggaggaggaagaagaagaagaagaagggtcaaggagaagacatcagatgagaaggtggtggcactaataaatggagaccacctctcacattaaaagcctggggcctgacatgtggggcccactgcacagtctcaggttacagcacggccatggacaaatcttcatccctttctcttgcttcacaggtcaaccacctttgtttgtttgcttcgttaaattttctctctcccaggataatcccctgggttatttttttaattttttttatgcacaccataacaacatgctttgctgctctcttctcctttctgttattcaaatgtgactttttttttaaggtagcttctactcccctctaggtagtgacagtttctttgttcttgttgctgtctgtacgtttgactgctgctgttcttgcaagttgatttctttattattagaggccttgattgcaattttcctagccagtagcatcactttctggttatgcatgattgaccccttctgcatgatgatggcaaagcaaagaacatttagcaaagaaactggtgcatgatgacggaacctttcaaaggtggcagaagcagacaaagagaagaacaccaagagattaatgtcaaaattgtaactgatctagaacaagcacacgccatcagcttgagttccttgggatcaaaacaaggggaggaatggatggatgaaagaggtatcaggtcacagggctgcacctgccaacaccagatgtgtggggttctgattgtgcaaaatttaagttaatttatttttcaggtagatagattagatttgtattcagaagtttttttttaaaaagttggatagatcagatacatagccagaagttgattcactttgaaattaagggagtgaaaatttgtgagagtcagggaggacggtaaaaaaaaaaacaacatgcacggtttagtgatgttcacatcgtaagaaatttgactaaaatcatcccaagacgtgtcaacacatgcctatcgattaaaatgaagaagaaatctgactaaaatcatcctaaaatgtgtcgacacatctgtgagtggttcagatctattttggcatatgcacgagagaccttttcaaagggggcctggttaaattgacacttgaccgttgatgtttattttactgttccagcatgactttggatttatcaaagcctaaaacgacgttaaatgcgtgaaaaaaccggcaaatttcgtgtgttaatcgcgataattgcatggaaattcatgggttctgctaactgtgagcactagtacgcatcagcctgggtgaaaaatgcaaccaaagcaaaggtgaaaatgaaacagagattgacaattactgaactcacaaaactgtgcagaagcaagggaaatcaagttcagtgtagactgtgcatgcattcgtcacaaaaatgtcatgtaaatgtaacgcaaatcgaacactacatttcggaattctgaacattggattatgtaacataaatagtcctaaacatcaggtagtttggtatattatcaccatctgcacaacctagtatatttcccatttaattaccccagtttctttccgagaacttttacagtacattgtaatgtaagtatatactaccagtatataatagggtagatttggtatttgttaaaaatcttaaaagggttgtttagtcatttaaaatagagatttatttccatcgggtgaattttaattccttcgtttcttttttttctggatctcgtgatccacgtaatttgagcaattttttgctttgtaatttgagcttgtaacagctgtttatttcagcccaactctatactgcattgctccaaaaaattgtgctgtctgaacattcttctttcaaggccttctctggaagactagaacgtgggagttgaatggatagtagtcacagaattgttcatacattagttatattggtatgtaaccatgctaattacattagttatgctaattatgccgccctgccgctgccacctgccgccgccgggctgccgctgccctggtcctcgaacgcgctgatgatgccgatgacgaaggccgtggagaaggactgcatcgccatgctgttgggcgtcctgtggaactggagcagcgccgggaagaaggcgtggcccttgagctggttcgtgccgttggtcaacatgagcagcccgttcggggtcaccgtcgccatgccatcgaagctgagattcgcggcggtgaacccgttgaggacaaacttctcgtcgccctccgcctcccgcaaacctccgcagcccgctggtgccgcctcccgcagacccgatttggggattttcagaagaactaggttttgggtgaagaaagggggaaggaaatcgaatcgattcccgatggcggcgacgccgattgtggttgtcgacggccgcgcggcgcggcgtgctcgcagaggcagtcagcgacggcggtcgcccatgcgcgcggcttcaagaaaaaatcgctttgactgggcgcaaaaggccagatctgactaggtgagaaacgcgaatttacaaaattacccctcacgcaaatagataaaaagataaatataccctattcaatttatactgcagaataattgggagaaatatcagatgaatttacaccgttagatcaaatatactggtagtatatacttcaagaagaatgtaccgtaaaagttctctttttttccctgggttaatccaaccaaattaagttccaagttctaggatcaattcaaacccagaagcatattcgagcataaagtgttctactacttgctgtcatcttctcctctattgaccctctccactagcagtgctacctggccctcttctgctcacagttgtattcttcagtatctgcacaaggaatccggaacatttttcatctgaggaatcattttctatggtgcttaaaagaagaaaaataaacaggaaacaactatttaaacttgtaaaacttgtaccacacgaaaaagatgcattagaattaggaattttacctgtctgagcatctggttctcattctgtagggtggagaatctttcttccaactctgagttcttcttctccaagtccttcaccttcacctcaagatcattcaagtatgccttctttctctcccttgcctgctgcgctgatacccggttcctcagcaaccttaatatttatagacacaataagcaaaccatatttgacaccaatcctacattactaacaatgtacacagatatctttattctaaactaaaatgtacacaaatgtattaatttaaaacgagttgaccaaagaatagaaatttggagattgacaatttttacaatagattttttcaggaatatgcaaaagatttgtatatcattgtattgaatttcaaagaagttacagtaggcaaatcaaaaggccatactctcgtggtacaattgcaggaccaaacaattgaaaaaaatagattatatactctaagctatcatacaattcatattattatgacaaccaattcaaaaatagagttcaaatacgacacaaagaaagctgtcacctgcctttgggatggcaaaacaagaagtttattatgttaattcaaacaaattgttacaataaacagcggcaggttaacatagtatagtcttagctaaaataatatatttgtccattacaatattatgtgtttatataagtgtatcagtgtgcagtcatactgttgatgttactgagataactaactcaagtttcatgtggtaacaaactgttgatataatggaagcacattatattatactgatgcaaacataacgtgacactcctttcctttttacaagaatataacactactcccattgatatcaaaagctcaaaattggctgcatagcatgcattgcgatttgcaacactgaatgagataggttggggggggggggcaatttatagtgagatatcaatagtatcatatatgatgtgcccacaactgttctcttcccatccacttgtttcccaacctaactatctagatgagcacgcatgcgacacatgacatcgatcgtacactgcgtccaactcaccatgaaagctagctagctaggagcaatgctttacagagatatgtaacctaaccccatcgatttcatcaggatttaaattcaacccctcttttcttcatcactcctaaactccaaactccaatcaacacatcatactccaagatctcgccgtttcgatcgattatcatcgcaaattcggtgttcttgctccatattgtttaatcttaaaccatgcatgagcccaagctcaacaagcattaactattttcatatcttaatctccatcgaatccaatatgatctaattctaaccactaagtattaaatatagatagccatacacaacttactccaatgatcacagcccttttggtttaatctcatgaacaattataagcaaaacaacaactgtatttgtacacataaacacaaagggaagaactatcaaaagtactctagtaaatataaaggcgggcaccttttgaggcgcttgtgctccttatccgcggggctgcgcccgcggcggcgcgcgctggcctgcgccgtcgacgactgcgcgcgctccgccccgccgccgccgccgccggccgccctccccgacgtcgaagcgccgcccggctccagccccagctccggcactctccctatctcctcgtcgctctccattcctgcaaaaccaaatcaatctcccataccacacaagaaccaaaaaaaatttctcttccaagaaacagaagtaaaatgaaaatcaaccaaagaatccgaacccgaaagaggaacagtaaaatggaaatcaagaaagggaaggagaagggatcgaagtggcgcttccttgccttccttgatctccatgtggtggccgccggagctggacgacctctcggagctggacggccgcgagctcgtcgcctgctcctgcattctcgccggcgaggagggattcgcgtgcactcctccgcttgcttcagcttcagcttccccactctgtcctctcctctcgtccttgctgcttgcgtgaagcatggaccatgagagctttttggctttaactccacatgtatatttcacaaaaaacccccttaaaaatacaagtactctacatatgtacccttactgttttacaatatagtccttacgttgtctaagtggagagggaaaaggggctatttgatgattgtacgagagatagaggggttacatggaaacccatcctccagcgacggcatttattgcgtccgtggggtttgggttttaagccgcgcgatcccagccgtcgaacccggcaagatccgacgcccccgaacgcctccacgtggccacccgcgagaccatgcagcgcggggcgccatccaaaggcgcggaggcccgctacgtggaggcgccgcggccgttcccgcccccgccgatcacaccgacacgcggggcccacgtacgctctggcccatgcgtcagcgactcgcgcggggcgcttttcacctggcgcgcgtgccgcgggagagggaaggaggggatcggtgagagatgcgcgtgttgtcgccatgcgtcgcagggctcgcattcacggcggtaagagcacgtagaatagcagggctataaatattttttaaaaagataaaagagcacgtataatagtagggctataaatatgttttaaaaagataaaagagcacgtacaatagcagggctataaatatattttaaaaagataaaagaaaagacagaagagtagcgggctatagatctgtatccagctatagcacagacttcaaaacgcaatgtgtgtatgatagatgggatcatatattaatatattaatagtatagtaaccaactattgcattaatagactattagattgatgaattggaactaacattgggttatactattaaacttattgctctgatagcgcgaggaacgaacgaacaacagtgggagtggtgggctggtggcctggcctgcacatgggctaaatttaggccctgtttactttgcggaaagaaattttttggtattacatcggacgtttgatcggatgttggaaggggttttcggatacaaataaaaaggctaatttcataactcgtctggaaaccgcgagatggatcttttgagcctaattaatccatcattaatacatgtgggctactatagcacttatggttaatcatggactaattaggctcaaaagatccatcttgcgatttccatgcaaactgtgcaattagttttttgtttttatctatagttaatgctctatacatgtgtttaaagatttgatgtgatgtttttagaaaatactttttggaaactaaactgggcctcatgagtgggagtctgctataaaagttcgttcaatcaaagtgaatttacctatgtctatccacactgggcctgttacaaacacgacgtgtcattccggagcacgccggcggtgagcaagcggcaagagcactaccagtgggtggcgcgcaaagatagccgggacagagaactcgatcgccggcgacgcccacggtgaacacgccggcgccatgtcctgcgcccgcccgggactcgtcttctccggcggcggcggtggcttccactgggcctggttggggcagccgacgaccgtgatgctgcgccgaacctctttctttgctgggctggaaggaggagagcagcccactactcctatggatcttaggccttcaccatttgtttgtcataaacttatgtaccgaccgaaaccatatatccaacacgattttgctgtacatctatcgatgaactctcataaaaaaaaactttagtactaccttcgttttttatgtgtgtgtgtgtgtgtgtgtgtgtgtgtgtatatatatatatatatatatatatatatatatatatatatatatatatatatatatatatatatatatatatatatatatatatatatatatatatatatatatgacatcgttaactttttggtaaatttttataaaaaagttacgcccaaataacatttgataataaatcaagtcacaacaaaataaataataattacatatttttttaataagacgaatggtcaaacatatattaaaaagtcaatcacgttatatattaaaaatagaggaagactatatcattttatgtaatttgaacagttagacactacttaaaaaaccatttttatagacgatgacatttttttccatgcgggtaggcctctcagagctaaatggctgcctatgaaaatgacaaccgtgggcgagattatcgtccgcctgcgaaaatagattttcgtaggagagatctgcctgcaaaaatacctttatttttgcaggcggacctcttaagagatccgtctgtaaaaacggatcggataatatcccatccgctccgctccaaaacgaggatatggtatgggtttttagaaatctgtcgcatacgaatgaggatagtatgaggcggatgcggatgcggatatggtatctctaaaatatggcggatgcggattatccgacatttttgtcggattatccgataagccgtttgtcagataatccgaaattatcaacatatataaccactctatctattgcatataacataagttggtatatccaatgcccaaattcatcaattaacatagattttttagacaaaagggcatgtagcctagtggttaaaagagcttcagtagcacctgaggtcctgggttcgactccccatgggagcgaattttccatgatttaacggtgttgtcctttcagtggtcgaactttccatgatttaacggtgttgtcctttcagtggtaggcgacgtacccggctcctgtggtaactctgtcaatctctccaggatttgccagcccaatcttcgaatatgctcataggggtagggtttgtgtgcgtgtgttcataggggtgagtgcgcgtgtgttgtgagtgtctgcgttgtactgtgtaattctcaaaaaaaacatagatattttagtctaaggcttttatcgtcgcatgtagctatattttttatattatggacatcatgtattcatgttgtttagcacttaatcgtataattattacgatgggtcatttattgattattgtattattgttccttggattgctaactcgatgttgcattgattgcatatacatgtaacatccgataaatttaatccgttttcgaactgattgcgcactatttccgacatccgaaacaatccgctccgcatccgcatccatacccgcttcgaattcgcttaaaaaatatggtttaggatatggtatcagcactatccgatcgaatccgctccgttttcacccctagatagaggtgggtagggcgggcgcgcgtgaggttggggtggtgtcaatttttttttattcgcccaaaatatttttgcaagcgggtggctatggcgcctgcgaagatggagatgcctcctgcgaaaacttgtgcttacaggcaggcctttctccacctaaaaaaatgattttttgttgcttgggaaaacgattttttgtgctagtgagatttgttttgagcttcgtgtaggtagggaatgaaaaaaaaatcatggcatgtgaacgggtgagggcaaagcatccacgtacacgtcaggcaatgaaccagaacatcgggtaaataaacctgaagataattggaaattgttttttaaaaaaagataattggaaattggaaaatgcctcaacctgggtgggcaaaggtagatccttttgtgctgcgtacccgtgccatattaaaatgaaccacgcggtactactcccttcattcaaaatatataaatccaaaatcaaatttgacatataatttaaacaagcaccagttcatataactacgatgtcagatggagtagtatcaatcgagccaaccaccaccgccggtcgccgtgatctcaacgtatattaattaaacacagacacaaatacttctcaccaactccaagtgtttggtacggtgaacaattgcgtgttctgacgagattgtactcgtactcatctactcgtcacatgccaatctctttatccataaagaagtactcactcgcacagttgtacctgtagactgtagtactcacttactccagaaaattatcttttctttctttttttttgactgtcaaacgaagagttggatcgtcataatctttgtttggtttggctgcttgtgtgtgtcagccaaatatagttttcaatgttgcattatcaaagtagctgacatactccctctgtccaaaaatataagcatttttagcatagtaacaagtcaaacattttaaactttaactattaatagcaaaaatataaaaaatatcaatcatgtaaaattgatgttgctagatttatcattaaataaactatcataatatgcaactcgttttatttaaaatatcttacttttatagatattgttggttaaaatagcatctcggagaccgtgtcatagtcaaaaatacttatattttgggacggaggaagtagattttattgttgaaggttggatgactagaaaataagaagaaacagtaagtcaagtaaatttgtcagcagggcctatgggcgaacctttccacgctcccacgagttgttccccgcgcgggtggcttggggctaaaaaaaccctagctgtcgctgcggcacccctccctcggccatccacctcgccgttgtcggagtaagtcgctggacaaccgcgcggtgagccatgatagtcgtggtgaggtcttttctcgttggcgagctatcccttgtgcgagagagacggtgcggtggcgcatgcgcattgtaaggctgagcaagatggcggcgtgcggcgaggctgtcatggcggtgcggtggcagatacgcacaggctacgaggcggttgctcccacatcctcacttctcccaggcgagctcaacaacggtggggccggccagatctaatgcctctagcccgggttcagaactcggtcaccggtgtggacttgtcgacgatggaagtggaggtagcatgaggcggctcgaggcagaggggatcggggcaaggcggccggatccacccccctcagccggcttcgacgtcccagcggcgtcttcgccgggaggctgcaaaggagcggtcggtgagcgcgaggaggaggcatgaccgacggtggcgggtggccggtgcggtgagcgatcctgcggaaccctgcgacagatatggccgagcggcgcggtagaaacacgacagcggtagcggccgtgggagagtcagtgatagctgcgagaggccaacacggttggtgcctagaggttggtgtgggcgacggaagggatgtcggcccgaccgacagcgtgggaggtcaacgcggcgacggcagggaggctagcgtcgtggcagcagggaagccggtgatggtgggtatggaacataggcatgcggaggttggccagcaggggggtcggttcaatagtgtccacgcactatcgaaggatgacgggtggtggagcgatggagtgatagcttcggatgacaggggatgggcagtaggtgaaaacctagcccggccttgctggaccgtcaacgacgacattccgagtgtcgttctccggccttctgggggcgttgtcgagttgtccctcttcctctagtggggctgtcgagcagaaagttctcctagttctctttgagacctcgacgaacggcggtggtggtacttatcgtcgcttttctccctagagacatcatctaggaggccccctagtcaaaacgtctctccgataacttgtgtgtgatctctctagatgttcgtcctcttgcagcggcaccctagcttttgcaaattgaccatgttggcgggtcttgtgggggatagcggttctattcttctctctcaccctctctccttcaatcccaaaggcgtggatagagttgagtgtggtgcttgtctgttagggtttggttttgggcggaccgactataacttcgttgttggtctagcggcggtcggtcatgcttagtgacggctggcccggtgctagcctctcctgggttgtgtgtaggcgctgtcagtgcgtgatggtgatgttttcttttttcgttcctggctattgttttcttgagtgctagtcttgtaatattttcctactctattcaatgaacaacactatctagtgctgttcgttaaaaaacatctgttagtagacttctaccgtttgtttttcagcttattcatctaaaccaaaattgaaatttttaaatcttaattttaagttgattttaaatttttatcataatttattttttatattagcttttaaatcgttgtataaaagttttattcataaattaattttttaagtatcatggtctatatttaactgcaagcaaaaaggagggactatttattttacttattgagtgaacaacaacaatttttaacaaatcataaccagccccctccacgcggggtatatttattttttcacatggaccataagtgccggactgaaaacgctaggctacttcaattcgtatacttatgtcttaatgaaaaaaatggtccattttacttctctgatctatttatcgggaaacattaaccctccatccaaaagcattaaaaagggttcactttacttcctaacactttctcatttttgtttctctatatataagtggtattttgcattgaaagtttgtagcatcgacacctgcatgagtaccttttaatatttttcttattttttcctattgtttaaggcgacgggttatatccgacaacgatatttgtagagtatggaatcatcggcaccaagatatacgcaaaattgttgtaaggagacaaagagaaagattcttatactggtttaggttcgagtaataacttactccagtttatatgtgtatatttgaaaagtatcacattaattataatgggaagcaggttagatgttctaacagctaacacgccgactaagatccaccgattacgtctccacgagttgatgtccgcgactaggccttatcttcctcctcgctatttcaatgtggctcgggtaaagtgaatcatttttaataatttagggtttaaaatgagtccatagatcatttagatccgatgaaatatttcatggagtaaaatagactgtttcttaataaaaaatatccatattaatcatcagatgtacatagtctactaaaaaaaatcttgaagttagagctaccgttagattaaggttgttacgtgagacattttatccatagattaaaataagagaatcaagcaactttaattttataaagtcttttttaaacaaaaatctacaggccagagccatgccaaaatgagcatatcatatctcaggccaacttttgttccatctatatcaattttttgtcctctacctattgaatgcacatatcatccacccctccgtcctataaatcgtagctatgattagtttttatgaaatgtgtccagatttatagctagagttatctttctatgggacggaggttctgtttggagaactaaccaagagttattttgaaagctattttttaagtacatagatatagttctaagttgtttggatccaagggttattttaagagctttttaacctttaatgtaccttcacatggagagagatagagagaaaaaaacacttttttcagtgggcctcatctgaaataaccccaattagcacatcttgggtgggatagtttttttgggtgggttatttccaaatagccctaaaatagctcacccttttagatctttttaggctgtttaggctatttgagggagggttaaaaaatattcctcaattcaaacagggccggagtagtatatcaactggacattggatattgatgatccaacattccaacgggcatggaaaaagtgatccctggggaatacaattgacagtggacacaacatatattaaaatattaattcctactagttaaataggagagaaaaatgacatgaaagaccaaaaaaaaatccctaaacccacttggcatattcgttttgaaggattcctaaaggaaactcaattcctttggaataagcactattcattcattcggtttctaggattcaaaggaaaatttttcataggaacactatgccaatcctccacaaatcctccaaatgtactaattccataggaataaaaacattcactccatcctcttttgtttagctaaatgtaggaaaaattcatgtgttccaatcctttgttttgtacgtgcattcctacattattcctacgttttttctatttctgtgatttgaaaatcctgtgaactgaatagtctctagaattgggatcaggtgcagtcacaacgttagcaactgcacacaacgtggagcgtccatttttataatcaacggtccaaatctaaagctacagtagctatgtgaacagtatcctgcgctacagtagctgctcgatccaggccgttcgatatgtatccgacgatgaaactgcacctgatccaaatcctagtctctaatatctcatctctccgcccgctgcacgcgttcggtcttcagtggcgactggcgaggacgcccgcccacccatgatgccgacgtggcctcgcatttgaattaacctgtaccagttttcacctaaccgactccgaattgtttcttttatattaacacatgcagtgttgtaattacaaatctgagcacatggtacatcgaactaaatcaatggtgagggagattaaggtcccatcgttttgtttatttggaaataagacaaatatcatatttgcaaacgagaaataatttatgaataaaatttttatatacatgttcttaataatgatttaaaagcaaaaactgaaattaaaataaacttcgatgaaaaaaaatcccaaaatcaacttcaaattcaaggttaaaaatttaaattttggctgataagtataaatataagcgaaaaagatgagactgtaagctcgtcacaaccttcggaggggaacctgaagcttaaactttgatgattcctaccaggaagttggaagcaacgaaagttggaggatggggttttgtgggacgtgatcatagtggatgctgtatgctttgctgggacaggacgaatggaaccagtacatgatgcattgtgtgccgaagctgaaccatgcatgcctcgctgtgccagtactaccagcccttatagttgatattggaattgaatccgattcggcattgctggtcacggcgctgaaaaagcaggagtcaggactatgatcaagcaacgggcaaccctattttccgagaaataaaagcttctcatctaggtatgtttagttcatgctaaaattggaagtttggaagaaattagaacgatgtgacggaaaagtttgaagtttatgtgtgtagaaaagttttgatgtggtggaaaagttgaaagtttaaagaaaaactttgcaactaaacacggccccagttagagttttcagggttgatatctcttttatttctagatctttgtaatttgtgtgctcataatttagcccaagtgggaaggagctgggacctgggtcaatctgctatatggttggaccccctcccagagtttgtaaatggctgggtggcttgtgatattgctgagccaagtggttaataaagacagaatagcgcagccgttttggctcgcaataaagctagggtcctgatcgagcaagactacatcctatatatgattagaaaaattccgaaacgaagaaatggttaaaggtaaaaaaaaggtaccactgctggcactagagtggaagagaaacaatatgacaagtgggtctagttgtatttttttactttcacgttgtttctctcttctattttattaactagaaattaatattttaataggtatgatgtctagcagtaaattaccatattttgataatgtatttccccaaagattgatttttctatgtccaacaggtaaaatcgcgaaatcgcggtgtcatatagcaaattttgtcttttttaacaggcaacagatgtttcattcaatagagcgaaaaaaatgacaactctaaaaccctaaaaagttgtatttggaaaaacaaaaatagatacaccaccaccaccacacaccgacgtcgcctgcacacacagctgaggaaaggactagcgctagaccggtaatagctaagcgtacgtgaccagccgccgctagcataaggagctacaaccataccacccaacaccgagagggtgggagcaaaaaaagatccctctcctgtgcatggacccgtcaacctacctccatttaagagcttcacacagaaccgtgtgaagcgggatttggtgataatgggtcctcctagatgatgtctctaaggagaatacaacatagggagcaccaccaccgtccctcctggtctctaggagactccaagtatttcatcatgatgtcctgttaggaagggagaggtgtcttgacaatgctcccaagacggaaaatgactcccaaaggcatcatcattgtcgccccaacaagaccgttctagattttcacatgtcggccaccctgatgttctgctgctccaagctccacaaccagcctcccaccattagcacgtaaacaccattgtaccaacaacccccctcctgcctccacatgctagtgttgcaaatgcatcacactgacagcatcttaggcctaccaccaaaagaaatcattttagctagatcttccaaggggataggcacacccacccttcctcaacattgatctagtgcacggcgtcgtcagccccgcctcctccaccaacccttctgtcacgctagctacggaagagagtgcaccatccaacatctcaccaagggtctagagggtgcagcatcaccccatcgcctcctcgccttgccactggtcgcacattgcctttgagcctccaagatgttcgcctcatttccatgtccatattccactgcctcgcctccaaggctacccactctacatcctgctgcctcatcattgccgctctcaaccccgatgccggggtgatggattcgaccatgagtgcgatgaatcgggtgcgtcgatgtcagatctagccacatacgacccgcaccctcttccagcttaagggttgtggtggccacccaactcggcttagagaagccttgccgttgtcttcactatggctgcacggattttcattggctcgcttggataatggtgaagcgggaagtggtcagaaagaaggagaagagatggggggtggcgtttgtgggttttgctcgtgttgcctccagagacaacgtggggtatgggtggttgctcagacagatgtttaaggtacaggtgccagcttgataaatactagcctcactggaagaataaaattaaatgcaacacattggatgcatcacaaattcataataccgacgtaactttaaaagtatgacatgcaagcacacaacaaactaagagtgctcttaaattaacgaggcccactcacagatcatcaaaccttgtattattattgcaccaatatgttgaatatttccaaaaaatgtaatgtaattccattatattaaaaaacttgaattttaagttacaattacatcaatatcttggtttatacgtcatttcttttacatgagacataaattggattggatgtatgaaaattcgtacatttaaatttatttcaagaattggttaccccactcatagatcatcaaacctactgttgttacataaagatcttgaatgttatggtgtctggttaaaaacatattggtttagatgtccttcctttcaaacaagaagaagaaacataaatctgattggagtgtggaaaatcgtgcatttaaatttatttcaaaataatactactttcatatataatactagccgagtttctaaaagtaatttgcaatagaaattaacgataaagttgtagttcgaaaaccatctaaatatctaaaaccacgtgttttatgatcacgaggtgtgactttttatactactggctagtactagtaacatgcaccatgcagccacatggacaaggttttttactacactagtgtctagtgcattcgcaccagtcatttgcataacttaaatacctatagaaaaaatgaaaataaattggtaataattattaggatgatataagtcgataaaaatatatgagagtaaattcaatctataattatatagaccaaaataataaactcggaccgtaaataggatttgctatttttatgtaaattcattcgataattatatagataaaattaataaactcggaccgtaaataggattgctatttttattttatttatctactagaaaaaaatgctcgtgcgttgcaattggagaatattattttaatcttattattgttatattggttaattaaggtgaaattcactttgttaaattcgcttggatatatttttcgttagaaagtcatgagctgcaattaggagtccgattagcatgtgagtttttcttaaagagatttcttatacgattccttctatattttcaaaagcgaataaacttaaaaactgactcatacacggatggatgatgtaccaaagtatcggcaaaaacatcttcaatttttataatagcagagaagagatagatcgaatttagatttatatgtttacagagtgatttaatcatcatgatatatcttgttaaatcttatcaattttttcacaactacttatcacacatttacacgcatacacttggccacttaggtgtaaaagaacagccatatatactggcaggcaatgcaggctacatctctcaacacccaaagcttgtctttgtcgcgaacacaagctaccccaactccggccatggcgcgccagcacttcctcgtcgtcgcgtaccctggccagggccacatcaacccggcccgagccctcgccgcgcgcctcgcccgcgccaccggcgcgcacgtcaccctgtccgtcgccgtgtcggcgcaccggcgcatgttcccgtccctcgccgcccccgacgaggaggtccacgacgccgacgccggcggcggcgggatctcctacgtcccgtactccgacggctacgacgaagggttccggctgttcgccagcgacggcgaggcggcgtggcggcactcggagacgttcgggcgcgtcggccgcgaggcgttcgccggcgtggtggaccgcctcgccgcgcgcggccgccccgcgacgtgcgtcgtgtacgcgttcctgatgtggtgggcggccgacgtcgcgcgcgagcgcggcatcccgcgggtgctctactggatccagccggcgaccatgctcgccgtgtactaccactacctccacgggctcgaggagctcgtgacggagcacgccggcgagccggagttcacggtggacatgccgagcctcccgccgatggcgatccgcgacctccccagcttcttcaccgacctcgccgacaccaggctcgccgccgcgttccacggcgtccggacgacgatcgagcagctggacatcgatcgccggagcagcagcaagccgccgatggtgctcgtcaacaccgtcgaggaactagagctcgacgtcctcgccgcctccttccctgaccttgacatcctacccatcggcccggccgccacctcgctcgacggcggcggcgcagccgccgccgccagagcgtcgcacgacctgtacaggcacgacgagaagggctacatggagtggctcgacgcgaagccggcggggtcggtggtgtacgtgtcgttcgggagcatgtcggtggtgagcaggcggcagaaggaggagctccggcgaggcctcgccgccaccgcgcggccgtacctgtgggtggtgcgcagcgacgacagggacgacggcgacggcgacggcgacggcggcggcatggtggtggagtggtgcgaccaggtgcgcgtgctgtcgcacggcgccgtcgggtgcttcgtgacgcactgcgggtggaactcgacgctggaggccgtggcgtgcggcgcgccgatggtggcggtgccgcagtggtcggaccaggacacgaacgcgcggctcgtcgccgggtggggcgtcggcgtgcgcgccgccaccggcgccgacagggtggtcgaggcgggcgagctcgcgaggtgcgtggagacggtcatggcggacacggaggcggctgccgccgtgcgccggagctcggtggcgtggaaggcgaaggtgcgggaggccgtcgccgagggcggctcgtcggatcgtaatttgaaggctttcttggaccgaattgcaaatgttgcgtagataatccaattcaccgttcgtcagggatgatgatgatgtctggctaagtgtcaaaatggctaaggttggcgtgtcatttcaagtgaattaaaaaaaggtaaaagtacgtgacgacgatatatggttttaattttgtaaaatgttagtagcatatcctattaatatcgtgaataataataatatttttttaaattgattaagtcacaatggcatcgatcaaattaacctaaaaaattaatcctttgacgtgaaaatggaaataatttacaacctccgcgtaacgtgcacacaggagggttgtcgttgtgcatgcgggaaaagtattttttttacatgtagatgcaatccaacatagtgtatctatgtcacctatgtaattaaataaatatttcataaaatttgacaaggtagataaagatgatataaaccactatgcaaacatgcacatcgagaaaataacaagttctatttgtgctagataggtactgtttacagtctaattttattatttttgtttttctgattatatattgattttaggcttgctcgattgtgtatagacttgtgccattgtgaacaatactatcatttttttctttcatatttttccatatctattcaagtcacatgtaaatgattaggtgggattgcacctaggtgaaaaaaaaaatccatatccttagtgacaggtctacactctgaagtgaacactccaagtctcaaagagcaagtttaatactcctatgagggaatcaatgggatcccgggtttgtcactttgtctttcacatgatcacatcaccattggcaatttggcattgagtgttgcttgctatacaggcaacagtgttgttcattaatgtagtattggtttgcaattgcatggacaagttttgtatttcacatgatcacatcactattggcaatttggcattgagtgttgtttgttagcagcaacaccgttgttcattgtagtattggtttaatttgcagttgcatgcacaaggacatggatttcttgttatggtgtgggatcccattaattccctcgtaggagtattaaacttgctcttgtagacttggggtgctcatttcagggcgtagacatgtcattaatccatgatagccacgctcacacataattgggaacctacagtgacatctatctatgcaagtacgcagctaatgcctcaggaacttggctgcagttgaacccttgttagctttctggctccgagtacgtaatggaggttgatagatctctggatgatatgaaggtatttagtttatcagtgagatgaatgctgtgggcacttaaaaagtgatatgaatgttgtgggcactataaaggaatcaatgagaattatctacagtaccattagtataataacagacactgagaccataagacgtacacctgaactactgctactatatcatgagcactaaagagggtctgcatccgaaaggaatacaaatatatagtaacgcctttatagttccccatccgaaaggaacgcatggtggggcgtcagcgtgtgtgccgtcaccggcgccgacagggtgctcgagacgggcaagctcgcgaggtgcgtggagacggtcatggtggagacagaggcggccggccaccgtcgttcgccggagctcggcagtgtggaagatgaagctccgtggtcgagggtggcttgtggcactactaaaaaatgattattcctggctccaccttattttcttttggcggacaaaataagaaactcttgtaaaaagggcaatcagaggtccctgattagaaaccgcttgtgaaaatttacttttacaagcgatcatcttaaaagggccacttgtaaaaataacacgatttttactggcggatggctaagagcctaagagcggttctcgtagccagtcgctataaaaaataaatctcaggcgctaaaaaaacacattcctcctctcaaccgtatgtcttatccttatcctcagcctctcttcccttgctccctcttccctcctttcctagcggcggcgcacccagggcgttgagggccactggcggcaaactcgagcatgggccactggcggtagatctcgagcgcgggccgcggggtcgtgggctacgggcggcggactcaagcccgggccagcggcggcagtggccactctcccaactcctcccagatctggctggaggaaaattggatgagaccaacagcagggtgggggaatggggaagcgtcctggtggcacggtgggtgctgtggaggaggcccgacaacacggtggagatggggaggaggctagcggcagcgaggtcaagatctggtagtaacagggcatgtctgtggcagtggcgaagggatgcagcagtggggctaggagggctcgccgacggcaacggtgcggggagagggtggctgccctgtccagattcaaggggtggcacgtcggcagtagtggggggagggcagcgacatctagatctaatggggctcgtcgtcttcggctcttcagatccggccacctcggcagagcaacaatgccggcaaaggcggtgcagcaatggagacgacggcctcggcttgattcccctcacttcttgagctgttgatctgtgatgctgttgtccattgagctgtgatgatatgctgttcttatttttatgccaaaagaagtttgtcggcctgaaaatttaggttttttaggtgggtgacttacagaacggttctaaaattttgattttcactgacctttaatcgtaggcagagcggttggtcgcctgcaaaaatcaattttcggccataggcgaaaatgattttttagtagcgtgggatcataatttgaaggctttcttggaccgaattacaaatgttgcgtagatagtccaattcagctctcgtcaggcgtgatgtcaggtctactggagtgtcaaagcgtcaaaacagctcaggctggagtgtcatttataagggttatccttgagggaggcgatgatcctcatagcaaatacaaatctgagaagattttgatgttgccctcttccttcaccttcccctggttgtctctctccccttctctggcttatataggcgtaacagcatgggtggaacaacagcagcaatagagcaagattgttcgggaaaataagtggtgaaaaagtggaatgttcacgtcatcacgagtaaaaattttactcacagatttactcataagtactcatggtagcgtagacgaatctcagacgtctatttttcgatccaacaattgtatctaagtttcactaatttaaactacatattttcatgtgtaacacgaggagaagacgagaagagacgtatgtgggtttgagatggatggatagagtagaaaagtacctcgtttttcacacgcacgcttactaaactactaaatggtactttttataatttttttatataagaaagttgcttaaaaatcgtattaattcatttttaatttataatagttaataatcagctaatcatatgctaatagctcacttcgttttacgtatcttcttaatcctatctttttcctcttctctcgaacacaggtgaatagttagaagatagatatctcttttcctcttttatctcttctgtttttttatactagaaaaatgcccgtgcattgcaatgggtgaaggatattgtaatcttattattgttatacggtttagctagggtgaaattcactatggggattcactatgggtgaaatttagccgggtcaaaattactgggatagggaaaagtatatccgagatcccttatcttttcaccgaattacaaaatcgtccctaaatcaaaaaatcggatatatgacatcacccaagatccttaggcaatattgactctggttgaccctgttttgtccgacgtggcagctgagtcagcatgagacccacatgtcagtgagacctcatgttcccccatctcttccatcgatcgcatcgaagccgcacggccgcgatcaccgtcgatgcctcgaagctttgccatcacgcccatgcaaagtcctgaagccgccgcgccttggtgtcgcacaccgtcgtcacgacgtgcgccatcgcgagcccaacctcctcctcgtcgtactagtcgccggcgctggcgcttgcccctgagaaatgctgctgctaaatataaacacgggcaacagaaccacctcgtcttcctcgcctctccactcccctaccctctccgacgatgaggtcgggccggcatggtccgctgctgagcggatctggctgctccttgaggagcgacgtggccggcgagctctggccgacacggatcgagggggtggcgtgaccgacgagcttcgaccggagtagaccgaggggcggcacggcctaggcacggggtgacggcgttggacgtggagcggggcggcgacgccggatgtggagtgggacgaggagatcgggacaataccggcaagcaacgagcagttcaaggcgacgcaacctccgcatcatcgttgttgtcctcgagatacacttgggatgtcgctccacaatcgaccaacctcgctcccatcctcgtcgccggcatgcctccatctcgcggtgaatatgggatcgggggcaagcgcgcgctaaggaacaatggagaaaccacttgctccatggcacagcggcgacgctctctcctcatcctacgcgtccttgattttgccaaagaactcgtgaccttttttgaacgcgaggtcttcaggttggtgagccctattgtttggcttattcacggataatgacatatttgcaaatgaaaagaaatttgtgaataaaacttgtatatacgttttcatagtgatctaaaagtaaatgctgaaaaataaacttcattgaaaaaaaccgttaaaaattcaatttttggatgataagcagtataagcgaaaagataagaccggttaaaaattcaaattagctgattagcaacctaagcgaaaagatgataccagtagattctcctcgcttcaccgacgtggatcgtttgggctgaatgccaacccattgcactgtgaacgccctagctgtcagtctcgtgaggacaatctacacttgtttgtatttcttgtagtcttccacaaaaaatatcttgtttgtttttgaccgttcacatagagttggatcgtgatgatctttattttggtttggatttttgtgtgtctcagccaattgtcgctttcaatgtgtttcgctttggttatgcctacctgtactgcttattaataatagtataatttataggtatacgtcccttttaacgattcaaaagcaaatatttatgaatatacttacaatgaaaaaaaaaatcgaccatgaaattacatcttaaaatttaaattttatcttataagcacatgtataagcaaaaccataaatcttgacttgtgctatatgcttcttccgtctctaaatatttgacgccgttgacttttttaaacatgtttgattgttcgtcttatttaaaaaaatttaagtaattattaattattttcctatcatttgattcattgttaaatataattttatgtatacatatagttttatatatttcacaaaagtttttaaataagacgaatagtcaaacatgtttaaaaagtcaacggcgtcaaatatttagggacggagggagtatatattactattaaagtagccgacggatatttttattattgaagtttggacgacccagagaatcagaagaaacagcgagcaagtagatttgtcagctattgagctggcctaaatttaacatgtcgaatgaacaacagtgtttttcattagtcccaaccaacctctccatgtggggtatattttatttttcgcatgaatcaggagggcagcattgaaaactcttaatagttattaattatctcctatagttcagtttttattagttatctcaagatgctggagtaagcatatgtatataggaaatttagaagatcagtcctaaaaatgatttttttatcattaaacaaggtactctttcagctccacattataagatgttttggactcttcatctatcttctatcttctagattccctgatatccatataaatatgaatttggacacatatatgaaatatatacatggatcaatgtgtaaatatatttaaaacccaaaatatcttataatttgaaacagatgaaatagcacataagcaaggatactcctaatgggcaggtgatcgctccttcccctcccaagcgatcacccgcccttctcccttactactttacctccccttcttctcttactactacaccatacaaatttgaattaaaattcaaatttaaaatgggtatgtaaactttttacttataaattttgggtctataaactaatatttgaattcaaatttaaattcaaatttgaaatgggtatgtaaacttttgacctataaactttgggtctataaactaatatttgaatttaaattcaaatttgaatcgggtatgtaaacttttgacttataaactttgggtctataaactttagatgtatagaaatattatatatagaaaatatttgaattcaaattcaaatttaaacggatataattcaaattcaaatttgaatcgggtatgtaaacttttgacttataaactttgggtctataaattttaggtatataaactttagatgcataaaaatactatatatagaaaatatttgaatgcaaattcaaatttgaatcccgatataattcaaattcaaatttgaatcgggtatgtaaacttttgacttataaactttgggcctataaactttagatgtatagaaatactatatataaaaaaatatttgaattcaaattcgaatttgaaacggatatataaacttttgacttataaacttttggtctctaaactttagatgtgtaaatttgaggtgtataaactttagatgtgtaaacttgaggtgtataaactttaggtgcataaatttactaaaatagaaaaataatgcggtgccaaaaaaggaaaccaggtggagggagggagggggaagggggatcgatcgctacccttgtcgccgggcgatcgatcgctacccttgtcgccgggcgatcgatcgcccattagcacttccgcataagcaaacctaatgacgagggcaaaaaaaaaaaggaatcagcggggattgtacgtagtactagtggggcaataactgacactgacgtatagatccagacccatatgtcagccacctctactacaccatcagtgctatagaggatctatatctgaaaggaatgcaactgcaagatgagtggttgtgatgtgatccatctctgcaataatagctacaactaatacagatgactgatgaaaagaatttcacccgatagtcatataggaaaaccgtggaaatttaacggaagtttaacatttagtaaacattaagcttaactctagctgatccagaaaattctatgcattccaaacattatccaaagtgtttttgcaactcatgaaaatgcatttggacccatgaaatgatttgcgaacgtagcgaaacgattgccacggtgcactaaaaaaaaatggttgtcaacctgcatagatggtataaccagtcaaggatatttcagtatcatatacatcagattggatttctgaaaagcaatacatataaatgggatcttcttcaggtgtcatttggtttgatgatgtttacgattccttggatggtcattgctaaaatcctgaccaaggatgtacctacgtccaagacccaacgatcacacactataaagttgaacctgtgaagaaatctcactattgaattagttttgagtaaattatctaagtgtgcagcaggcgccatcaggtctatacttttaaagttgctgcatttggcagaaattttttctactttttcctcctgctgctggctcctttttcagaaatgcaagcttccacagaggcaactagacttgcttccagatcatgacctcttatctctgatctcactttcctcagaatctgttgcttcatgactgatctctcagcagactggacgttcttgcacatgttcaacccctgcacgtatcttgataccgctccactgaaagacccacctgctttctcgagtgccacaaatttctcgatgatttgggacgagagcattctttcgatgcaaggtttggttccgaccaccgcaatgtctaccagaagctgcattgttagttcctttgtctttgaagacttgcggtcaagcaagttaaccaatttttcaatggttcctgcttgtaaaaatctctgtaatacaagtgatccccccttcgcaaagataatctggtgaagggcatagtatgctgaatcctggagatcgttgatgttgcactgcatcatgtcaattagctcatgaacaatgttagcctctaagaacctatggacatatggttcccctccagtgcaggctaatttcatcaccagaaaagcagtgtgagacctcacttggttgctttcaatgtctctccgttgcagcagcagtgccaacccattggacatattgcttcccaaaaggagatcttgcacccttgaatcattagccctctcagcgagaggtaataaaccttggatcgcctcaatgttatctttgttgtctctgtgcagtatcttgtgaagaatcaactcaaaagattgttgaggctttggtgatggagttacattttggtcaaataaaacaaatctctccaaactgagacgagcatgccaaggcaaatgagtcaacgctccaggtcccatgcacccctgaagtggcgcaccaagttcacagaatgtttttagcatgataatcgcatgatgctgtgagatctcagaaccactgcctagaagaacaagaagcttcttgtcaattcctgattcgatcattgtctcaacagcccttaactttcccacctttatcaaagatgctagagttgtaaacacaatttcatgccattcttcattctcaggagagagtaatttcgcaatttggtccataggaatggttgccaaaatttcatcagcagttgtagcatcaacatgctcagatatcttggcaagaacagtagaaacattggctagagtagaagaatcttcacagccacgaagaacatgaattaatttatccacagaacctgctgtttcaagagactgagcaagcttagcataatctccttggaaaaagattactgtaatagatttggtgacagtaacaatgagagatgttgaccccacagaaattaactccgctattcgaggactaagtattttgctgaagtgaagcctgctagcctcaaattcagatatggatttgcattccatgagagcttgggtggtgcttcctagtaaaatctctatctccatgaactctagcaaagaaaataatgatcttatcttctgttcagctcgctcttttgcgctctctttgccaaaaatgaaaagccaaggagacaccaatgcagcatattcaggaaatgaaccgaacaaaagagtatgaacagcgttgtctgttttactctcgaggtaaagcgaaaccatgtcatgcatatgatacatcgattggtcttccagtttgataatgagtgagccttctactagtttcgagaccacgagggggaataaagtgtcctgcatgagtgctgaccacatggattcaaggcaagcctctggaacaggttcatcccatgagatagctgcaagcaccatgaaaaaccttcttgaattttctggcattgcttctaagctgaactcaaaagacccaaagatggtcaatgtggtttccacttctttctcattcacatatgaaaccggtccaggtgcacaagttgcatatgtggaaaggttggagattgctctatcccatttttcgactctggtctcctttctgagagccttacccatgacagcaactgtaaggggatggtggccgcaacgatccagcaagtcgtacgcaacaggctgtaaagaacaggaatgttaaccatacaaacccataaaactaggtctttagtagttctaagttctaagttacatattgaacatctcttgtatgacagatacacatataactaattactttaagtagactaacatgaatataaatagttggctaactatatttgtgtactttccatgttaaacatgaaggatattaaaacgaaaccaatgttgaaatgtaaacacatatacaatccacatgaagatgataccttagctgcagggtgcaaaacaattttatcaggtaaaactaaaataggctaaagtgcaggagtattcagtaaccatgaaagatgcaaatagaagagtataccgggagctcttcaacagtaagaaggctatgatagagaagaatgtccttgccaatttctttgatatcatctttggatatttccaccttttcagcttctgcaatctcataaattgcctcatccctcgttgtcacaagataccggcaatcattatcatataggtttgtgaagcgatcaactatgtcttgctcccagacatcatcaagtaggatcagcatgctccttcctaccaatgcagtctgaagcaagtaacagacatcttcaagatctttgcccacatcctcattgacagtcatggaaccaatctgcacaagaaatttacatattttccgaacaagacgcttgtggtattcatccctattaccattgcatgccgctctactgcaccaccgcccaaaactaagctcaattgcaccatccacaaaattaccaggcgggtcagaagctatttgtcgagcaagacacgacttcccaataccagataacccgacaatcaggacaactcgatgactaccatcattgataagcagctccctgacatagctgcacttctttgacactggatagccatgctccgacttgactctcaccaaggatggcgtactcttagctgtagacgctatgacattgcccacactctctgttagcttctgtaactcaagccaccagttgagatcatccctgatcagctgaacatacttcatcagagggtcccctgtcaccgagctccacacaactctggccaagcccttcttccctttgcctttcttcaacacccgcctcgcctttgtgatgttggcatggagctggtccatcagcttgcctaggctctggagctgacgctcgagctgcggcgcgtgcatcttgtgcgcgtgcttctgcttggattgctgcatcaacagcccaaggtcggacacaaaatcctcaagaacctggagcctcctgggagcctcggcgaagtcggcagccgcctgctccagcgcgccgaccgcggtgagcatcgcggacaccagctgggtcgccgaggcaagaacattcacagcatccatatggcctcgcttccggtcaaacaaaccactagagcaacagcaacgaagctccaatctctcccctagcaagaattcaatactcagagctggctgcgacaatccgacgaacacatggcgtgcgttctcctggccgccaccaactccaacaccgaatcctccggtcccgttccttcatcaacctcgacatcaccaaccattcccctttcccccaaactcccaatccaccaccaacacggacggatcacaaccacagaccaatcaagaacatgcaattcatagcgagcaagaagccagcaattacgagtggaaaaggggaattgattatacccaaggaagctctcgcggccgctgccgaagcaggtcaaacactcagcggagtgagggagtttggtgggtagccgatcgatggcaagcggattgagaggaagaccaggagagcaggtggaatttggggattatttgaaaagtagtacgcgttcttcctacccacatcacgtcagccgctcgccgtctccggacggtggagtgcgaattttttttatttataattttttttattaaaagttttacaaaaatagttttccattttgaaaattgacggaagtagtcgcctaccgccgccctctcagagggcggcgaaaatgacgtggcagacggccgttcgctctcgggcgacggccgtcaacgaaatttgcaggcggcccccttgccgccctccgcgagggcgattttgtactgtgcggggggccgcctgcaaatgggcggcgaggggggggcatggaattttgcaggcggcccccttgccgcccttcgctagggcgattttgtactgtgcggggggccgcctgcaaatgggcggcgaggggacatggaattttgcaggcggcccccttgccgccctgggggagggcgatttttgcccccccccccccctataaagcccagcccctcctctgtgaaatttcattatattcactaaaaatccaaaaaaaaacgaaagagagaggggagggcagcagaaggggagcggcgaagccctgctggttcgctcacttcatcacaggtatgctcccatacatcttttgcatttgtactaatatgttatgtttgagtatatatgttgcgttttagttttagttccatatattttagcacatctgtagcacacagcacatatgtgtagatccagagcatagaatataatagtatgaattgagacatagacagtagtgttaattgtaagatgtagtttaatttgatctggagaatgtaatgtacttttagaaatttagagaacaatattgtagagaatgtaacttagggcgtagtacagaaatgcgaggttaacgcagttattgttttcatcaggcacaatgtcaagtaaggtcacatttcagatagttcacggtgaaggaaatattagatttggtccagatggtgttgatctgtcagattttgtaatgacatctaagggcatcgatagccctgcggagagaacatttcagtcaatttatagttggttgttgagaggatttagaatagaccaagaagtctacacaatgtcagtatcagttgtagtgagtcgtgcaacagaaggttatttttgggaactaatgccgatggacagcactgctgcttggagacggtatgtgcaaatggcttttgaacggtcatggcccctcgttatatttgtgtcggtacaagagaaagatataaatgtttcaatgcaaaccgaagatgtagagggtcctatcaatgcaggggatgttgttggaccatcgatgcaaaatgaggaaaatcaaccaagggaggagcaggccatgggtatggcggatgagggggagagagtccgtataattgttgatgaaatggagagggaagattcggataatgaggaagcggacgacgacgcatcatccgatgaggaaggtgatgtaatggccactgattgggcaaatgaggacttctctggacttgttatatcagagggtgatcatgtaccctgggagtataaggagaacgaggtaattgagggtgcaaggtatgctcataaggatgagatgaaggaggcggtgaagcattgggcagtttccttgcagagagagtttagggtggtcaagtcaacaaattatgtgtatgaagtgaggtgcatgaaggaagattgtccgtggcgtgtccatgcatataagggtaaatggaatgattattggaaagttagcattgtgaccgagcacaagtgctacttacaaggggtggagaagtatcaccgaaacatcacttcagcttttgtggcaagtgagatgtacagcagtgttgttggtaacattggctttgaaccaaaatcaattattaggcacatcgagaacaaattcaagtacaccataagctatgcaaaggcctggagagccaaacaaaagatcattgagatgaggtatggcacatttaaagcttcttatgataatttgcctcgtttgttagccaccattgcccagaggaataataatacttactatgacctacatacatttacatcggttgatgatcgaacaaagagtgtgctgcaaagagcctttttctcattgggtgcttgcatcaatgcttttatgcattgtcgacctgttctatgcatagatggaacttttatgacaggtaaataccgaggtcagatattgacagcaattgggtgtgatgggaacaaccaggttctacctatggcttttgcatttgtagagagtgagaacactgaaagctggtactggttcctagagagagtgcacattgcagtggtgcgtatgaggcccaacgtttgccttatacatgatcgtcatgcgggtatgttgcgggctattgactacttgcggaacggttgggatgagaagggacttccagctaagtggcctgatgttcggagtcggtggtgcatgcgtcacatgggtgcaaatttctacaagcaattcaagaacaagcatcttatggagctctttaagaggctctgtgcacagaaccaagagaagaaatttaatgagttgtgggacaagttggatgagttgacaacgaagcaaacagatgagcaatctcgcagaccacaagttgaaggtgacgagcctcccatacctcttggtgcattacatgatgacccaccaacaatgagaaggaggtcagggtcgtccatcagaaatttcactcagtggattgagaatgagcctaaggagaagtggtctctattgttcgacaccgatggatctcggtatggcataatgacaaccaatttggcagaggtgtacaactgggtaatgcgaggagttcgggtacttccattggttgctattgttgaattcatccttcacggcacgcaagcgtactttagggatcgatacaagaaaattggtccgtccatggccgataacaacatagtgtttggcaacgtagtgacaaagtacatggaagataaaatcaaaaaggcacagagacatagagttgttgctcaaggcacacaagtgcatcggtatgaaataatgtgtgttgataggagcaggcgtggtatctatcgcaagcaagtcgtgcaggaatgtgtcttgaaggcggatggtggatgtacctacagttgtatgaagccgaagcttcatcaccttccttgctcacacgttcttactgctgccggtgattgtggcatatctcccaatgtgtacgtctcaaattatttcaggaaagaagcaatctttcatacatggagtgaggagatatatgggttcgggatctcaggatcttacacaacgctgagtgcccaagttttttatattccagatccatctaagttaagggtgaaaaagggtcgacgccaaactagacgcatcagaaatgatatggatgagtcagaagcaggtgggaggactttacgctgcagcaagtgtgatctgcgcggccatacttacaagaaatgcccgaagaatgcagaagttccaagcggcgcagatgctagtccatctggacaggcaagtgatggtaggcgaccacctggtgaaggaacaacaagcaggcgcgcaaggccaaggcgtcgtcgtgcagcaggcgattccatggtataacaatgctttcgatttaggaaataaaatactgttgtgatgtaatgagtgttcggactaaatacttctatcgtgtaatttcaattcaatgttgttgtaatgagtacctccgactattgttgtacaagtagtattgcgaactattcggtgttgtatcataatgttatcgtgatgagtgttcggactaaacacttttgtttgtttgtactcttgtttaatatgtgtgagtcattcgcttatgaacatttattacttatgttgaactaattatttatatgtttctgatcaacctatttgatgcaggtatggcgtacgacacaccggcgctgttgaaccgtgggattgacaggaaccaccgctcgttcctgtcagcagttgagggtgcacagctcggcaccttccgtccacgcacgtcgcgcgagtggttgcgtgtcgacccccgtcacgttccttggtacgcgtatgtttacatttcaactcaactttgctttgtgttgtacttatgtttgaagtttgctctatacaggttgcgtgcggcaggccttctaccactttgtaggcttgttgaggcggcggcggacgaccgtgacccagcgaagcggtgggatgcagaccggtcactccttgccgctcttgtagaccgctggagacctgagacgcacacgttccaccttccctgtggggagatggctccgacactgcaggacgtgtcgtacctgctcgggctaccgctggcgggagcaccagttggtcccgtggacggtgtttttgggtggaaggaggatatcactgcgcgcttcgagcaggtgatgcgccttccacacctaggaccggccaacacccttcctccgtactctacagtcgggcctagcaaggcttggttgctccagttcactgtaagtaaataagttgtttattatcatacatgcttatttgcgaccggatgattgttttgtactaacatttcattcttaattgtaggcggaccttctgcaccctgacgctgatgattactcggtccgacgctcccttgaggcgtacctgttgtggttgttcgggtgggtgatgttcactagcacccacgggcacgctgtggacttccggctggtccactacgcacggtccatcgcggatgctcagccacaggacgtgccgcagtggagctggggttctgccgtgctagcagccacgtaccgtgccctctgtgaggcgtgcacgaagactgatgcgggagcgatcatcgctggctgccctatgttgcttcagctttgggcagccgagaggtttgccataggtcgaccagtggtggacagcgcaccctacggggttggtcgcagcgcgcagtggccagaggacggtcccacgatggggacttactggtgtcgacgtggggttagtgcaacttcgctgcgttataagtttatcagtcgtcttctttttttttcttcacataacatgtctaattccgatcatgtttattgcagcgtcgttacgctcacgtccaggtgagacgtggttacccggacttcgtgttcgagtttgaccgtctccagccgagcgacgtcatctgggagccgtacacagaagaggccgtcgctgcgagagcaccgctaggactttcgtccttgtgcacacgcgaccaggcttactggctcaccatcctgccgatggtgttcgacattttcgttgagcctcactgcccgcagcgtgtgatgagacagttcggacttaggcaggtgtttccgggcaacgtgcagccgaccgtcctccctgccgaccactcgtgagttcggattgttcatttctaaatttttatgataaatacatcatcgagccatataatttaactctcttcacaggttgactcgacggggacagctggcaggcgcactttgggctccacgtgtacagcagtacgttgacgactgggtgttagctacagaggaggtgatcaacgagctcttcccacacacggaggagaactaccgtgactaccttggctggtaccttcctcgcactcgtgcgcgtgtgaccttcactccagacgccccagagccgcacgttgccgctgtcacggacgcgtatcccacgcaccgtgaccgagactacttcgtggcggtacgtccaatttgtattacttcttacaattatttcatttatcttgcataatataggacaactactgaattttttatttccatcttgcataggctgatgccgcacgggatatcagtgccgatatcaccgcagtccaagtgaggttgaacagaggtttgcacttgactgacgttgagcagagggtgaccttcgaccggatgcagcagaagatgcgtgcggtcatgcgcgtcttctcctgtcgcaacgccgtggacgtcgtacctccagctggtccggtacaaccacggcctcgcgcgcctaccgtcggagcaggacctcgacctacggcacctgtttcgcacggtactgctcagcccagaggtttcttaagttttgttcctgtttttgtacgaaaacatcaccccgtcataacttgatgttccatcctcgcaggacctcgtttgccttcgagcgcccctagcttcggagcagtgcgacctacagcaccggtttcgcacggtacagttcagcccagatattagttcatttttgtttcagcttttgcacgaatatgtcaccatgttttaactgcacgtttcctcatcgcaggacctcgtctgccttcgagcgcgttcgcaggcacgaccggcgcttccacgagctccgcaggggcgttcgccacctcttcgagcgcgttcgccagctcttcctctcacggagcgtcgatccctcgcccacacggtactttactttttattactactgttaaatacttgtacgaaactgatggtccttgtccagcaggatttgcagccgggatcttcggtactggggcctcttcgtctcacgccggtaggactggtcctactagccagttctacgacgacgacttgcatggtgcacaccaccacgacgtcctaggctcctctcagcttggaggagctccagaggcgcacactcaggagcagccagagatcacacctgtacaggcaggacgggttggccgtgccgtacccccggaccgactcacgtactcccaggggcacattagggcgcagggtaggagggataggggtaagaggcctcgtcagtagtgttctacctcttcagtccttatgtgaccgtttcttttggcttacaaacttataaagcagtactatttttgctattactactgcagtactacttgtgtttgtctcgtctacatagttcttttcattcatatggtgctagaacaacttatactcacgacaacacactttcggcgcttcacggtagtgtcagatctagtagcgcgcacagtccacaacagcacacatgaaaagcggcacctcgagttatcactatcaactttcggcgctgcctgttgacataaagtgaatcacgcccacgcgtgatcgtcttgtcacatctaatgaataatgtatctcattgagttcacatatattgcagtgaaaacgacgctatataattgacaatctgaaggcaacctcttcatatattctttcccactagcacaccacacacgaaaatggaagcctattcattggtaatacgtaatctagatttgagattatgtagaacatttttcactacaattttacattttggcagcaaaccaaatatgatcaaatgcaattttaccttaccaaatatttggtagtgccaaaacttgcttatattttggcactaacaaaatatttgtacggtaacaatccaaatatgccctaaaaaataataaaattgtattttaccagtcttggagattttaatcttgtatagttttcaatataaaaagatttgataactattgatatttattaaaaaaaatatagagcacagtacaaaatcgccctcccccagggcggcaagggggccgcctgcaaaattccatgccccctcgcggcccatttgcaggcggcccccccacagtagaaaatcgccctagcggagggcggcaagggggccgcctgcaaaattccatgccccccctcgccgcccatttgcaggcggccccccgcacagtataaaatcgccctagcggagggcggcaagggggccgcctgcaaatttcgttgacggccgttgcccgagagcgaacggccggctgccacgtcattttcgccgccctctgggagggcgatttttaaaaatcgccctcccagagggcggtaggcgactaattccgtcaattttcaaaatggaaaattatttttgtaaaacttttaataaaaaaaattataaataaaaaaaattcgcggagtgcagcgaggcgagcagcagatgctctccgatccgcggcgtgcgtgcgagccgagaccgacttcccggctcacgtgcgaggcccgttaactgttgggccgccacggcccacgggaccacccacatacatacatacatacacacatgctgatatgcaaccaccgtcttgctaacctagcacaaatgctacatgacggtatctcattcggacggtatcgtctaaaatgtgagtatcaaccgatgtatataccagatatcagacaatatctagaagataacattctgttcgaacgagatataaaccgatatttatgaggtatcggacgatactacctcaaatatatcatcccatttaaacgggatatatacataccgtcgtttagcatttcccgataataaagcacatacacatgagacggtggttgatctccaaactccaaaggcaaatggccggccgcagcaacgagctgatcgatcgatcgctctcgcaaccgcgccgcgccgcctttgacacgataaaagctggcgaagctaaagcaagtggccggagacgcaacgcaagcgcgcggcgacgcggccggcgcagcgcagcgagccaaagctgctgcgtgcgcgcggccacgtataaagctcagctcagatggctttgccgacggcgagcgaagccatcttttgactgcagcagcagcatgcagggacagggatcctcgtctcctcatgcatatcagcaaacgctgcatatgcatggcactgctgctgctgctgcttctttttcttttcttttttttacttgcaaaagaaaagaggtaggaggaggaggaggaggaggaggagtagtcgggagtaaagacaagagcgaggcaatatcagtgagtgcatctcaagggcatccaatgcaactttgaaactttttgacagtgaagtttcaccacccatgcacccttgatcatgcatgtgtccccctccacattggacttcgggtctagtttcaccgtaacggtagtggtgttccgcgcacgtgctggcgcaaggttttgtaaagagttgtacaactactgctagtagtagtagaaaaaagagtacttactattacaatatacttgtatactagtgcggctacatgtgacggcgcaccggacgtagctatgtccaagtttgccataccttactagttccgaatgtcatagatttcacacgcacgcttactgaattttatctctatataatgctgatctcacgtgcaaacattgtaaattttatctgtgttttctgctatacttggcatcaactggctcaaatataaaggattcttaggaatacatgggatttcgttggtcaattcgtagtaatctccctaaaaaacttcggccggtttacgccgccctggagaaaaacaatctctctaaaaaaaattatattccaaagtagaccataatcaattttgaaggacaaaaaatgcatttatttgattgctcctaacagttaggcacatctctaaatccacaagagttgatttctgcaaatggcattgtcccccaaccaaactatggtactgcaatatcccgctttgacatttcgcattcgcagtacacttctggttatcccattactgtccgataagataacattttttagatactaaaatgcatataacaaatacatcaaacaaacaattggataatgaagtgaacacgatcgagcagggcaattaattaagaagcaacatactagttaataataataatacttctcaagcgcaagcgtttcgggttacacgactcgatcgaagagcaaacatgccgaaagaaacaggaaataaaacgggtaaaacatagataatcaggggtcgacgggtcctcccaaatgggaatcagaaccaaatctaaaacgggaagaaacaaaactagtaaaaccatggggagatttcttttgcattctactttcttcttcttcttatgtagacatcacaactcttaacgctgcttctgctgctcgtcgtcactgctgcaagcctcatcggatccagatcgatcggacacgtacggcaaattacacctcagtgcctgcaaatgcataacacgcacgagatcagatcatgacatgaggcaggagacaaggggagattcacgataatttacaagtaattttcgtatgtcatagcgctaccggagtcccgcggtgcgttgcacctgaagcactccatcctgctggcgaagttgtgctcattgcatccagacctgtgatcaaacatagaaaatacaagagttaacagaaagcagagttcattattagacacatatattgcgaagttatgcaaatccagcattggagatgtatggaacatgctatgctgctacagttgccagggagctaaaaatgtgacatagacacttcgcttatcagtataatatttaaagcgaccacatcatcagtgatactcgaggcctagggccgttcattcagattttgaatgaaactgttcaaaaataggccatactgatcaatttgccgcatgctacgataaatatagtgtcatctcaactacttccggttttccacagattgagaaaaccatggatgaatacctctagttacaactacggtactatacataagctactaatattctcgtgcagcataacagaaccactagctttctcatgaatgattgaatgaagacaggcagcataattagttgatcctcctgtctcttctgaagaaacaggaccccccccccctaatatgcaaaaatggtacggagaaatattacaagctttcaaaagtccgtaactaccactaaattaaccatgtaaattatccatgccatgtactgtcttataccataataagggctgggaaaaatcatatattggctatgaatagttgatttgctaaagcaaacagatattaaaaccaaaagaaaaggatagcctaactagtgatgacacgcacctggtgcaaatccagtcgccagacttccagccagggcggctggcgcggacggcgccgctgccgaagccgtagccccgcgagcgcgacatgtccccaccatcaaaggcaccagcgccgccactgttgacggcagcatcgtccttgaaagcagcgcacttgaagcagctggagcggctggcgaagttgtgcgcgccgcagttgcagtaccagtcacctgggcggacatcagagccagtgccaaagcctccaccgaaggaggaaccaccacggccgccgaagttggcgtagtcaccgccaccaccgctgccgcgatcagcggcgccacgcggctcgccgcagcgctggcataggtcccggcggctgaagttgaggtgctggcacgccctgcagtcccagtctcctggcttcctgttcatcttgtcttaccctgcacatcaacaatgtaccactcattaaagattattggatcagagcaagggcgaagaaaaaatgatcaaactgaagcccagaagcacacttgacttataagataacccagctgttctctctttgcaaaaccttttgcattcaagaaataggaaaaccacaaccaacatgcttacatgcatacaaaacaaatgaacaaacactaacaggaagctcagttacctaaacaagtatcagctgctgtgttggtgagctctaaggtggaaaatgctgtgaggtgaaagggtgatgcagcgaggtgctaatgtgcaggggtatttatagtgcggtggcaggggttgctgaaaccgaggggcgggttatctttgtgcctttggttctttggtgcactttggcccgcgaagaacaagagaatcacgtaaaactagaaagaagaggggagttaaagaaaagaagagaaagccattaaagggcaaaagaaatatggggagtttgaatgcttcctttaccctgcatctctgcctgccttggcaacatcttttgagacatggggtggagggatggcactagtgcgcaatattcttgtgcttaggaaattaagatgcaattagttatgtaacagtggttattcgaccagaatatttttagcaaaatacatatagaaccaaagccaccaaagctaatatggaatgtcagaggaagaacagaaaatcatttcagaaaaatggagctaatggttagtacaagtattatccactatttctgttttcagggagcattatggaccaacaataagaggggactttagatcagactggaaatttttagaaataaatctacactcaattagatatctccttttgttctttaagtacagcttgagtcaaaagttattggtctcatgagaaaacagttttgcaagactggtgcgtttgacatttcccaaatttccacatgaaaaggattgtacatcttcaggtcaagtaaaagactgattcacagtgttggagctagtgataaccaatattcttgaaactgacacatcatggtttcaagaggaaaaagaaaagactcgaaattaggtcctgaattattgtgcttaggtcgatatttaattttggacaagcatggctgaatcaagaagtgtttcatgtctaaaaatggcaaagattctaatttgagtattgactgacctttttctgcttttgataagagagatacaaatagtttcagattaagtctcagagaataaaagggtgatcctgagggttttgatttgattgtatctagttcaaatgttccaatcaaatgaggataactgagacgagtcaggaccacatgatatttaatctgtgttcacccgagactgacatatcaggaactttatggacagcgaatgtatagtttcacatcaagaataggtacatatttggttagacatgcagttgaggcctgctgtgttaactgttgtgagacagaattcctgacattccaattttccaagggccaacacatcaccctcttctttagcagattccaaaatggcaaggcaaaccatatctattctaaaagagtgcaaaatctaattagttatgcctaataatgcagcgtatcacactgaattgtgcaattgtgctaccggtgctccagagctatccacacacgtgtgatggaaccagaatactgcatttgcacaactatttcaagcattacaccaaacttatgaaaagaagagaagcagagtgtaaaagcagcacttattattgattctacgagaaaatggatatagacctaaatgagttaatctgtgaggtctcaaaagagcaagtctatgaggtgacaagaatggtggttatcattctgaacttatgctatatctattgctatataactatccattcttgcaactataaaaagctattctcatcccttatattcgatgctaactttgccttctttcactagcaataattgaggaaattccatggcatccattccaacaaacggtcacatcggctcaagcctaaaactatgtccggtgaattatccgccaaaatagcaaatcaaccatccgttagtgtaacatagaacagtttatctaaactaggaaaaatcccatgactctggtgtaagcataattaaccggctaaagcattttttgtcactaattaagatggcagaaataaatcagtatagaccaaaaaaaatagatatcaagcagagctcaaatgaagtgtgacttttttatagattacaaatagactggctaaaattttggataggaaggaacaagcatgaattgatccatgatcttgtagaccatgtgaatattcgagatgcaaggatagaaaggggcataaaacttttgtcaacatacctacaaggtgaacatctacatggaaatgacatgatgtgcaagttacaaagcaaaacttacactagtttaaaaccatgaaagaagtatcatctcaactaaagttaaatctaccgaacgaaactcttttttcttcagagagaatatctcacagtgaataagatttattctgagattgggattaattaatatagttcttatgttgacaagagtaacaaataaaagtttgataactatcagttacttgatgcacttttgctcagtcattgcctgagcttatttgtttggaaggacatcctcggaacctttcagaaattcaagcacctctttgggccccttgtgttccctctcttatcaacaataaggtgctacggaaacacaactttgttcatattaactaaaaatagtagcctctagccctctagtcatatccataatagagttgtgcaattttgtctaatgcaaacccaaagcatactgacagggagttaatactgctgacaggggtaagtgaaagaaaaggaaccacttgaaatcaagacagacataatggattgctgagctgtaagtggtgagcaattggctttatccttttttataagaggaaacattgagaaggaatttccgaaaacagagaaagatcccatcatcttaaattaaccttcatttcacaacccaagatgaacatgatggcagaaagcaaatagagatggcctgatgcataactgataataatgcatgaatttcaataaagatagagaaatcaagaggcagtagtcttcaagggtgccagtgaccatcctctttagaattctttttcacctccttttatttccggttgtgttttgcatctcttctgttgtttccttgcccctttacttgtgctcatccttgaggttgaggctttacatcagtggatttacttttgcttttcatctatctattttttctattatgtcactgtactatatttgctagcactagcactggtggtagactgatagtagatgccaggaggggatatgtaggtttcaaaaccataggatgatatgccttctcttccattccattctcttgggtgaagtgaaagcagaagcaaatacaaatcatggagtccttgggaaaaaaactgaggggccaaaagctagcttggattctctcctagggaagtgcttccatgcatgaccatgaccaaactccaaaggaagcgatcacttgataacctaacatgctttgattctctgcttttgcacaaccaagaagaacagctcaagccttttagcttttgtgttaataagcgtactaaaaccagtatgagtactactgatagaacaccaaaaatcttcagcaatagtcccactgtcaaaagtatctgtttgactggtgcggctaaaacatgactaagcttctaagtacctgagttctacatgggaaattactaggtatacattaataaactacaaagtgcaaactaaaaatccatgttagcgttcgactatatgtagcagaatatgattttaaatcttggtagatagtcaattgtgggatcaaatcaccatttatataaacttgaggtattaaactgcttctgatttcactaaaaaattaaattgcttgtgatcacagggatacagattccacaatgtaaagcactagtcccctatgtgggtgaggaaagcgtgtcatggatatatgaacgatatatatgaacaccagttgaacttgatataaacaacaaaaattcatgccatgcggcacctacccggacctcattggagctcacagaatagtcaaacagtcataaacaatcatacgctgtcctcacttttgcaaacattggtttaagacttaaagtatgctcttattcctagaaattgaatgattagttgcacttgaaatcttgcatggagtatcttggcctgtagattccaaagacagactgcagagcacatctgtttcctagtcgttcatgcactaattcctcactgagaacaattgcacgagcatagatctggtttaactaagtgtcttgcgccattacccacatagcaatgggaaggcacacgtatgggctaggatgaaggcatctacccaaaacagagcaacactacagtacacaaacctttaattatatattgttataagttggatgcgcagttgcgcacaccatgggtacaatagattccatggcatgtgtgctgtattgattcaccacacttgcatgcactactatagtttcaggatgacgtaatctggccttgacaaggtgaaagttagccaccacccagtttggctgaccagctttcttgtatacattcgatgtggtgcactgcaatgcatcatggagatgaacaaaaagatctaaatcctctttaggtttagtccttcagggcatcaaagccccagtcagcagatggaccgtatcatgaacagtgcacagcatgatagcacatcataaccgagcgttgcgcgttggcagccacagccccgcacacatatccagacgcgctcaccgtgctaaatcctatttatttcttaatagcacataacatcgatgactagacatggtttcatactttcatctaagcatgacttataccttacttagtatgacaaacaagaaaagtttaaaatgagtgacagtcaaaggtaatcacataagacaaactacaaaagcctaaaaaaaaattcagagcacacaacaaacccacagccaacatagctatcacttttctcttgcaactaaagaagatatgtaccagtaaaaaatccacaaacccatagctgtaagtccctatactctacaacaaggatcatgcccccactcatccaaggctccaagagcaaaaaaccaccaccagctctgccccacccctcccctgcggcgcgcacccacatcgaatcggatgcaacagctgtcgaacgatcaacggcggcacgaatctcgacgccggggacctctccccccacaaaccctaccgcgcgcgaacgagacgttgctaatgctcgcaagaaaaaaaattcgacacacggaggagatagccaggggagggagacacgccatcatcgcccgcaaaaattgcacaaatctaccctcgattccgtgaatccgcccccctcctcccgcaccgatcacccaatccaacccgtctccacgaacaggaatcgatcaaacatgcaaattaaagcgcatcacccgaaacgaacgaaacaaaccgagcgggagaagaagaaggggagggagaacgcgcacgcacctgctctctggagactcgtcggcgtcctcgcacctgcggacttcggcggcggcggcggcggcggctggagcagaagcgatctcgatcaggcggaggagggaggaagacgagacgacgagataataaataaataaatcgcacgaaacggggtgagatttaagccagcatcaaaacctacctctttaatccaacccgcggcgttttttctcccttttttttcttttttttggaggtttttatttttcttcgtctttctctcgtgttcgtctcgcctcggcccacgaggaggttcacgcggcggcaccgacgtcgaggcgggtcaaagggggcctcgtcctcccgtggggcccacgtgtcggcggctgcccggggcctcgtcctcccatggggcccacgtgtcggcggctgcgcggggccgcgtcgcgcgtcgccgtgccgtgccagggcaagtgtgtcactgacaggtggggtctcgttgtggtcccctcatggatggctcgtatagtcggggtagtacacgtgttttgggcgaggagaaaccgggcgtgtcacgtcgtgatctggaccgtccgtcgggtgattgacgttggcccccgtctttggctgatacgcgacgaaaaatatcagatcataatcctcgtgcttgtttgggtcgctgtcgatgctgctgatgttaaggtgggtgttgctttggctgttcgtggcataattggtcatgttttcaaatatgtttgagtcgtacccgtgaaattatgcttaattacaaacgtacactctctattagttcttgtttcgcaaacatgtcaaatttaatattgttacgtggtagaagtaacttggaattcacaaactaagtgcccctttcaatcaaagggtttgatttagaggattggggttttccaaatcctataaaacggttttggagaaaacctagcaagaggttcagcatcttggaaaaaatactttagtctatctctttcatccgattcatgtgtttttctgcggtccaatcaaacaatcacttctgtgttttgcaatcttccgttttacacatgcattcctatcgaatcaaacaatcattcatgtgttttgcaatcctccgttttacacttgtattcctatcggaattatgtgtttttcctattcctttgtttttttattcttataactcaaagaggccctaagtagggatgaaaacggtacgaaaatggacggaaaccacctttatcggttttgttttcatattttttttcggaatcggaaaccccggatacgaaaatggaatcaaatattgtcaaaaccgaaaacggtccaacgctgatacggtaatgaaaacttatcggaataaaaaacccctcaaactaatctttaaactatgtcaaatccaattatcaagtctcaaatatcaacattacatcataaaacacaatcatataagtccaattctcaagtttgaattgggtgtattggattgggctgaattgagtgacttaggaattaggatgttgatttgggttggactggggaggaattatagactatggtataggcctttataatttcggaaattccgataaatttttcggaaagtttccgaccgattccgagttccgacgagggcttcctttatcatattcaattatgttttcgagaaattatttccgaattcattttcgtttctgaaaaaattccaaccgacagatttgttttcgaaaataggtccggaatccgaaaagtttacataccgttttcatccctagccctaagcgtagttgatggagcctactcacctagtttcatgtcataacctgaacacaagtgtgttggtatttacatggtatctgttaacaataagttttcagtctataacaagatgtttacggtgacttcgttaatcttaagttatgcctctttcaaggtgcttagtgcattcatatcctgccttagtataaagttgatgcccactaactcctaaaactcaacatgcgaccataaagctgatggtagctttgttaatcttaagttatgcttctttcaaggtgctcactacattcatatcctatcttattataaagttgatgctcactaactcctaaagcttaagatgcaaccagggtttacgatttcgacaggcccttccgtttcgggcactagcggaattcggaatttcgcgaaatccggtggaaaaccggaaaattccgaacaaatttcataaaccaaaatttgaatacaaattccctgattttgctgacaagttcttgaaaaccggtcggttttggcgaaattccgatcgaaatcatcgaaatttcgatcagtaatatgtaatttggaccaaaaatatgtaatttggaccaactacttactgggcctagtacatgcaatccgggccatgtaagtgttttcctttttttaattatttattcttttctttactgatgtaagtttcagtaaatacacacaatatatcatttttttcaaatatttatatcccaatagattctattaatatcatattataagattttatttgtttctttccttttttatcaattcaaatttgaatttggatgaaactcctcgaaatctcaaacagtttatactttcaagcctcgtcggaatgtcgaaatttcgcaaaatccgaccggatttcgttggaattgtaaaccctgaatgcaactatgtcacatcatcacccactagcaatagttacatatttaaccttatgcaagcatacaacatcatgtacttcctccgtttcacaatgtaagtcattctaatatttcccatattcatattgatgttaatgaatttagacatatatctatctaaattcattaacatcaatatgaatgtgggaaatgctaaaatgacttacattgtgaaacggagggagtataatttatttaattctacaaatcaacatgtaagtatatctgatcatcaccctcacttcatttccacaatattttaacaaatctatctatcatttttataatatttaacatacacttgtcaaaattgcaagtatcatttgtttgttttatagaagtattgataaaccctcacgttttattttttttctttttacttctagctcgattatcgaaaaaaatatattgaaaattggttaataattcccgcagcaaagcgcagggatacacctagtttcatagggatgagtgtgccagtgtgtatacaacaggcccatttttcaaaggcacttattgcacatgcaacttcctagaggtaagagcaggtacaatagcaggctataagagcatttacaatagcagactattagccagctataaacatattttaatgatataaaagatgagagagaaagagcagcgagctacagatctgtagccagctgcagtacggactctaagatgcgatgtgtgtatgacaagtgggaccatatattaataatttagtaagcaactattgtatgaattagctattacactggctatagatgaattggagctagtagtgggctatactattaaacttgctctaagagcaggtacaataacaggctataagccagctgcaaacatattttaagtagataaataagaagagaagagcagcgggctacagatttgtatgacaggtgggaccgggtattaatagtgtagtatgtattattgtatgaatgagctattagattggctatagatgaattggagctagtagttggctatactattaaacttgctttaagctaactataaacatattttaaagagataaaggaagagagagaagagcagcgggctacagatctgtagccagctgcagcacggactccaagacgtattgtgtgtataacaggtgggaccagatattaatagtatagtaaacaactattgtatgaattggctattatattagctatagatgatttggagctagtagtgagctatactattaaacttgctctaagtgtgtacgcgttgtactatatttcatgagtgtacgcacatgtacacgagtacctataatgtgtttcgggggaaaaaaaagaacttggaatccttctattgtaatccaatttccttggtacaaccaaaccacctggaatcgttgaaggccgatccagcaacttaaagctaaggatgttgtttcagaccaaatcacttaccagtaagttgctgtcattagtcattacagtaggataactgaccgtacccagcagtcttttgctcatgcaatactgcaagtctgcagcttaagacggttaatcagttacagtttggtgctgacacaatgagatttatctgatccagctatgattatcatgttttatactcctagttagtttcctggactggcaagcttgtactgtgcctgacatatttagcatagcagtccaagaagatcaatcatgcagagataaactgtattccctgttcaataatcgatgagtgattcaaaaacctggctaacagtgcatttgcattcttttgcagtgaaaaacaaccagatgtcccagtaaaaaaaaaaaaaaaaaaaccagatgtgccaatgtgcaatctcttctcagccacagagaataaaatggagaaacgccaacatatatgctgtgggcaggatcaaatgggccacaagagaacaggaagctgagaggtaaaagtatagatgggccacaagagaacaggaagctgagaggacatggatgattcacatgtaaaatgcaactatcaagatagaaagaaaatactcaccccattatttgtcaaatgaatgtcaaacgagaatcaaatatatagttagctatttgtagcccaacagctgtagagatagattagtgaaatgctgtagaaacatcattcaatatgatttccctttgacattatcaatattgttgatctaatcttctagacatgctgaacaaaagtggttgtttgagttcttgcagtagtgaaaatagcatcgtgtgtacagtgtgaacatcacatattgcagaaataagctaataaaaatattcacctggatacatggtccaagtacttgtcattgaaaaaactgatgccttagcttatccaagcttctcctggttaatttaccttgcattgtattgagtattgacaactatgactaaatcgagaatagtatatataaataagtagtagcatgctttcacgcagtttagactattctcactgatctttaggtagcattctaaagtttcagaattccaaacttctgctggaacaatgaaatgccgtaataagctttataatgcaattgttttggtgtttgatgtttcaaagtgcaacactactaatgtttagatgctcgttactgttcacttttgagtgatgatgcgactatgagtcaatagacaaaggagttgggatgcccatttgttggcaggctgccaatacttagttaaaaagtgttgtattggccattttgtatcatggttaataaattcagccttcatttctgattgtgtgagttgttgctgagttatagttttattcctacagtgcttgctgagatgtggtacgtattatttcccttccaatcctttcatgttttgtatcccagtttctctctcagtggttatttagaccatttttgttttcagataaggaaatctgtattgagctcacaagctttctcaaaataagatgcatcgacattgttgagaatatagcatttttcctatatctgaagagtgaatcaattcttatggcctgaagatggatcatgactgtagaagcttgttgcttgttacaaagtatctcattgtttgaatatctaactgacccaaaaacaaagtttagaaaaggaatcaaggaatattagaagcacatagtctgaattttgcaaatattcatccaacgtaggttctgggttagaaaaaaagacagaacaactataatgggggcaaatccaaaagatacagatatagcatatctgaactaaatccacaggcataccatcacctgaatagtatgtaaactgggtattttccattctactaaatccgcatatccactaatatacaacaatggagcgaggtaagtaacaatgtttgaaggtaaccaaccacaaaaaaccttataatattacacatttaccattgttgccatcaagacggttgttcattccacccgagatacacaacaagagttagaaatgttcacccatcagcaagttcctgcaaagaaagaagcatatacatctttcagttaaaaaataaccgagatagccagtgacatatctcaatactaaaggctttcttgttactattgtacaagtaataagttcagagcttaatgttctaagcacaaagttcttttaagaattaagagtattatcatctatattgctctaagcacatacattttcaagacttcttgtaagaccacacgcataacagttctaatctgtaccaaaatgtcatattgtaagatttgctgcaaacacaagcaatgacattgcaagcagcacaagttcagaagaggaattgagattgtaagcttgcttacatcagtcactgtcactctcgacgccatcatcgctcccttcggtccggcggagagcgtcgcgcgcggcggcgagcgacgggtcgatggaggcggcggtcttgaaggcgtccagggcctccgcggccatgcccttccgctcgtagcactcgccgagcagcgcgtgcgcgcgggcgttctgggggctgaggcggacggcctcggcgaggtcgtcggcggcctggtcgaggcggcgtcggtggcggcggtggagcgcgagcgcgatctcggcgcgcttcgcgagggcgtccccgcgctcccgtggctcgagggagcgcgcgagcggcggggcgagggcggcgtcgagggcgcgcagcgcggggaggcggtggccctggaggtcgagggcgagggccttgaggatgagcggggcggcgtcgcgcgggtcgagggcgatggcgcggtcggcctcggcgagcgccgcgcgagcgagcgggccgggtggcttcttggtcccgcccgcggcggcggcgcgcgcgcgggcgaggagctgggcgccctgcgcgaagtggcggcgagactgcgcggcggcggcggaggaggagccggcggaggaggcgcggcggaggcggtgggcggcgcggcgggggagggagtggagggcgacgagcatggcggcggcgaggatgaagaggaggcacaggacgatggcctccggccaggtggcggcggcgcccagggccagggcagccatggctctagctcgagggaggaccggggactaagtttagttttttttccttttcttttctttttttttagttgggttggagttggagagtggatgtccgatctcggatcggatgtgagttgtgaccggaccggccggctttggaccttggaggaggtgggactgggaccgtgcgagctcggctggtgtatactccctccgtatttaatgtatgacgccgttgactttttgtctaacgtttgatcatttattttatttaaaaattttgtataaatatgaaaacatttatgtcatgcttaaagaacatttgatgatgaatcaagtcacaataaaataaatgataattacataatttttttaaataagacgaatggtcaaacgttagataaaatgtcaacggcgtcatacattaaaatatggaggtagtagttacaaaggttcaccaaaagatgcggttatcgcacggttatcacgcgtggtaactttttcagtttttaaaactacggtatatctctcgataaccgtgtggttttctcgataaccacgtgattaccttggtatccaccaaaccatgcggtgacagtaacctcaccccccccccccccaacagtttggtaaacccttgtacaagtacaggcctattgtgagggatgcaagccgtcagcagttctactgacatgtgggtcacacatatcctcggactcacatgtcagtgagcagtattgtatgtgcgtattacataggatcttaattgcattttgaaataactgaaatggatgaattaatattaatcttatactccctctgttttaggttataagacgttttttgactttagtcaaagtcaaattgcttcaagtttgaccaagtttgtagaggaaaaaaatattttcaactaaacacaaatttattatgaaaatatatttaattattgatttaataaaacgaatttggtattataaatattattatatttgtgcataaacttagtcaaatttgaagtagcctaaaacggagggggtatttaggatatcaaggcatcacatttccttgaaaaaggtgttcaagaacagtttctaatattttaatgaaggcggaattaaaaagaaatatgaccaagaggggtgcaaatgtatatagaacggactttcttttttctatttcccaccactactagatagtgggcataaatctcaagattcatgtatttgtccaagtaaatccattatggataagatttaaagatattttccacgaactaactaaaattaaaagattcaaggaagaaaacaaaaggaataatttaagagtagatttcataaaactacatagtgatcaaatctatcacaaattaaacttactcgtgtttgttcaagttacaagagctttaagttcatatatagttggagccttgaaactcactcgttttagagtgtgttcgacactacaaacttatactattttgttttttacgtgcacgttttataaattattaaatggtggtttttaagaaaaaatatctataggaaaaatactttttaaatcatattaattatttttaaagctaataaataatgtactaatgatttttctcgtttttctgtacggacgggaggaagttcccaacactgagtcgctataacgcacgcaacctagaaggttttctaatgaaatcttatgattatgacttacaatatgtcatttaacgtggggttggcaagccatcaccaaattaacaatcccgtatgagttaggagaattgagatcggttgcagttgcacttgtaactgtaagataaaactgtatataattttggccatccatttttacggtttagaccgaacgctacagtagtaatggctacagtatttcgtgctacagtatttttctacaataccagtacagcatacaatctggaccatccgatttgcatccaataacatgcactactactgcttaagttgcagtcacaatagtgactgtagctgatccaaatccgagttaggagtacaacgatatcaaaggttgtgtcccttccccagttttcccatttcgtctctctcgtttttcgcgcgcatattttccaaactgctaatcagtactctctccgtcccaaaaagaatctatgtccacatacatcaacctagaaggggtcacatcctcttgtaggttgattcttttttggaggaacgaaatatgttttttttaaaaaaaattatatgaaagttgttttaaaaaacatattaattattttttaaaaaaatagttaatacttaattaattatgtaataatacgtacttcgttttgcgtgtgggggagaaggtgttcccagcctaattgttgggtctaatcctctatgcataccgaactgttgttcacttgtttgagctattgctgtagcgaaaaagctcacttatgtgtaaattaactatgaacatagcatactgcaacacagacaaaaatatcatgccctacttgtcattgaaaaacaattgatgcgttagcttatccgtgtttaaatttctagctcctggttattttgctttgcgtttggataatatagataaacgaatgacatgctttcccccaaattagactatatcaaagattaatgacatcacaagtttcagaaatctagatgatttttttcctaaaacaatgggatatgttctttccaccataatagaatggaataggatctgtttggcacagctccagctccagctccatctctcctgagctagagcttagccaaacagtttcagctccacctaaaatgggagcggagctgggtggagctctctcacaaaataaactagagaggtgaagctgggtttaggcagcttcacaactccactccagacctaactcctggagctaaatttgggagttggagctctaccaaacaggcatgctcgcttcccgagtttctgaacgctacgatatttttaaaaaaaactttttgaatgctttaaattttaaatatacttttcagcgtataataattaatccatccatttgtaccctcggatcatatatctatttaacattctaatccatctggcctaaaagaacacgaccgaactcatccaacacataaaaaataaaatatcacatactccctccacgtgacaggaattattcttaaaagtacatttattccaacagccacaggcatcactccaccagcaaagaccggacgaaaaatggtccaggaacatattgctgatagtatttattggtatgctgatcaccatagatcatacaatgctagctcgattgggatttgggaaggacgaagagtgtccaaagcttgcaaaagctagctccatccatacttgtaagagatcgagtctcttctcgatcaccaggtctcgactccactgatgaagagaagaaataaagcagaaaatcgatgtcagtagagttataaagagaaatttattctgaaagatcttatatataatcccttgcaagccatagtttaatttccaacacacagaagcaagaaaagcaattttcaccctgtgcaccccagctttatcgatcggcattcgacaatgacaataaaatactgttcagaaatcagatcaatgaataaagtcccacccagaagcatctctacaaacatgccatgcaaactagacatttgaagaggacatgcttagcattttcaggctggcacaaagaacatatatagagtgctgatcacctgatatcccaattcttttttaccaatctcacagtagactgaatcctatttctacaagcaagccataaaaaaaatgcttaaacttcaaagagattggtgcttgccagatatcggatatgtgaataagatccaccacaccatgcatgaaatgataaagctctacatatggacttagacacgacagtaaagattagttcttttcctaaagcccagtcaatagaataaccagaattagagaactttaataagctctacatatggcagagggaaggaaatacaaaagcccaaccacatatacccagaaccagatatgttttccatcgcccattgtccattatatatattcaccccacaatccagatatgttttgctgaagcccttccaaaactgagaagaaccccaaggatcagatctactttaattttaaaagctcaatacacacatgactatcccctgactatagctagtttgcaataacaatattcattttgctagtttcacagtgaaacctaacccccaaactccttaagagaaggaagatttgctatttaagcatatcatgtttcttttctttttcagtaagaaggaagagttgctcatttaagcatatcatgtttccccttttttagtaagcccagcacaatactagaatcttcttctaatagaatccattttgtaataaatggctttagcatgatataatcccatagggtagctagatatggaaaataaacacgaagtaacagaatagcatagacataatatcttgaagacattttttttggaaactctcatcgatatgcataacagaaggggaaattatcgaattaaggagcattagccacttaatagatgctaagttaagcgtttttttctttttcattttacgccctaaacgccagtcctctatctatttcctgtttgaagtgccatagcctcctgttatcctacgcgtacgacgtttgcgatggtgtttagttaacctcgtgcatctgttttagtgacagataattgatcaaaaactatttaatggcaaagatcaaaatctatttcagtgacatctactaatgacttgcaaaatgtcatcttgcaaaatatggttaaataatgtatgctgaatgtgagcacaagctatggcttgttcctagctacttcctccgtttcacaatgtaagtcattttagcatttctcacattcatattaatattaatgaatctagatagtatatatatgtctagatttatttacatcaatataaatatgagaaatgttagaatgacttacattgtgaaacggagggagtagataagtactcctctgcagtaaaaataatagtaacatcttgcaagcagcagcagaagttgagtaacagtaattaagacagtagtaattgagattaattgtaagagggcttacatcagtaattaattacttcacggcggcgtgcccgagccagatccttcttcttgtagccgcccttcttcctcgagcactcgccgagcatcgcgcgcgcgcgcgggcgttgtcggggacgaagcagagggcctccttgagatcggcggcggcgcggtcgaggcgggcggggcaggggaagaagcagcggcggtagtagtccaggttgatctccgcgcgcttcacgagcgcgtccccgcgctcccgcggcgggaggcggccggcgagggcgcggagcgcgcggcggcgctgccccagggcgtccagcgcgaacgccctgacgacgagcagcagcggtttgtggaggccgccccaggcgccggcggcgatggcgcggtcggcctcggcgagcgccccggaggcgacctggaaccggtggtgtgaacgcggcgcggcgcggcggatgtcatcgaggagctttctgcagcgcacgacgatcggcgggaggggtgggagtggttggtcaggggtagggagagtgaaggcgacgagcacggccacggcgccgcccgccgcaagtgcgccggcggcggcggcggcggcgtagccggtcgggcccatgtaggcgccggcggccaccgcgttgctggtcgacatcgccgcccccatcggcgggaatggtgggatcgagtggtgctccggttgcagcttcggtaatcggatttcggagtagggtttatagcgattagcgagcgaggacacagagaaggggaaagtgtgttttttggtttcaaagtgcggtttatcttgtcttataaactcacaaaacctatttaaaaaattcgtaattttccaacgtgtgggccttgggtagccaggcatgttgggttggcatggctggtccaaagaaggaataagtttactttgggcctcttgacttggagttcgacattcatccctaggctgcaaaaccggatacaacgcattccccaacttataaaaccacgcaaacgaggtccatcggtaatattgtctccggtaaaaaacttagcttgtgtttgtttgagttacaagagcgataagttcttagctggaatcttggaacttacacaattttaaaagtttctcgaagaaatcttacacaatatgcttttttacatatagtttggcaaagttagccatcaaccgaacaacttcatataagttaccattttactatttctagttattactatcacagtaaacttccgcagcaagacaagaggtttaacctagtatggcatattgcaactgacaaaaatatcacgtgcatatcatgttcaacttgtcattaaatttctaacgttattttgctttgtattgaataatacagataattgattggcatgctttctccaaattagactatgttttgactgatcattagattaaggctgtgttcggcacaccctttcacatccccctctcgttttccgcgcgcacgctttttaaattgctaaatggtgcgtttttttgtaaaaagtttttatacgaaagttgcttgaaaaaaaaatcaaattaatccattttagaaaaaaatagctaatacttaattaatcacgcgctaatggaccgctccgttttccgtgtttactgttccggttgggaacacctcatggcgaacacaccctaaataacctcacaagtttaagaagcttcagaattccagatgttctgctgtaacaaagggcccctttattttcccatagtgaaatggaatgtaagaatatatatgcacgcttcttgagtttctatgggggttacgatttttgtataaattttgtacatataaatttttaaaatattattttaaatccacttttgaacttatagtaattaattcattctaccctcaaatcatttatatattcaacattctattcccttctgtctaaaagaacacaccattatccaacacataaagataaaatttcacatgctccctccacatgacaagaattatttttaaaataatacatacatcagtaaaaagacacatttatcccaatagccacatacatcagtaaaaagacacaacgatacagaccagcaaagacaggaacaagtgggctaggaacatatcactggtaatattattggtttgttgatcagcagatcatacaatgtgctagctcggttgggatttgggaaggacgaagagtgtccaaagctgcatgcaaaagctaactccatccatccttctatcagagtcttctcaccaggtcttaacaaaggattccactgatgaaaaggaaaaaataatgcagaaaattaatgtcagtggagtcaagaggaaattattgattctgaaagattcaaacattccttacaagccataattaagttccaacaaacagaagaaaaaaaacaattttcaccctttagcttagccctatctctatggacaacactagtaaaatactccctctatttccaattaatcatcatatttttttattattcctaaataatcatcatattagtattcattcactaagtatatttattatgcatagaagtatatagacattggtgtaggaatcgcagccatatacacatacccctttgcaaccactacaatgttttggttggttattggcttaaaaaatagtgaggatgatacatatatcgagagtttgtgaccgaagtaaatatagtatagaagagttattgatttttcttgatcatgtaatatgatgaacaattgggaacggatgaagtatcgttcaaattcaggaatgatgtcctaaaacccaaaagcatctatacaaaacacgctgggccattggacacatttgaatcaaactgggccatccggccattattggtcatttaaagaggatgtgtttagcatgcatttgcaggatgacatgcacgtacaaagaacatagagagctgacccccaagtctttttactttaccaattgcacagtagactagctgaatcctatcttcgcaaacaaaaccatttttaacttttgaagccactttgaagaccccaaggatcagattgaaaaaagagagaaaaacccacacgagattgatatatgtgttttattcttcaaagctggtcagtacataaactactacccccctgaccatatatatagtatgcaaatccattttagacaaaagaacaataaaatgtttattttcctactagtttcaaaccccgaattctttggatcgagtaagctccttcctcagttcttcttgctttatcaattcctccaagagatcgacatgacttgtctgttgactgttgccaagagtcaggtcgcccgtgtaggtcaaaaaggctaggaagctatgctacaccttgatcttaatcacggagggcaagattaattaatggttggaaattatgtgtgcccggtgtttattagtgggtaaacactagaaaaattggggaaagtggtgcgctttttgacagcttttttttattgataatagattaaaccggacttacatctaaagaggcttctgggagtaattaaccttgcgtctctagtattaataagcaggtttcaaaattcccaaaaggttttattgtacactcgatataatattatttcgaccgaaattttttaaaagtttttattttttgaatttgacaatatttgtttaaatttgaccaaattttatttttaaaaatcaaataactcggaccgaaataaccgacacttccatattggtacccgatacaaatgccaaaaacgacatattgaaccctggtattaagtggcagataattaattagaatatatatttcatggcaaatagcattatttcccccacaaaatgtttataacttgttaacatactgtaatataatatcttccgtgaaagaaaagaaagaaaccataaatatgcttgtaattaattaattaagcagaagcaagcagcagcggagaagagataagttcaaaacagtactactagtattagaaagagaaatttacttattagaaagaccctatcattcctcacaacccataagttccaacaaacagaaccaagaaaaacaattttcaccatgttaccctctgcctctatatatcaacaaaccctaataaaatagtactgttcaaattcagcaggaataatgtcccacccggattcggatcagtgactgcaacttaagcagtagtagtgcatgtcattggatgcaaatcggatggtcagattacatgctttactgcacacagtactgtagtaaaaatactgtagcacgaaatactgtagccattactactgtagcgttcgatctgaaccgttgatcgtaaaaatggatggccaaaattatgtgtagttttatcttgcagttacaggtgtaactgcaccctatctcaattcgtcccacccataagcatctccacccccaaaaagctcatcaggatatatagactgaaccctataccggtccgtaagcaaccccaaaaaaatgcaccttcaaattaagatattggtgctcgcgaaatactccaccaaattaatatgtgaagatccactacgtacaccatgaaagaacataactctatgtggacttttagtagaaaggataaaggtctatgcatggaattaattagtagagtaaagataattagtttcccccaccgtacccccacccctaaagcacagcaaattaaatagaatcaatagaataaaaactatactgactaagaaataaccactactcttctcatttatctgttcatggcagctctaaaagaggtaatagaaatattattttcaatggatcaagagcacagccacagttcagaccaaaatattacggagtactcatgtttaatgacccactttccatgcactgtatataccccaaccaaaaacattatttaacttgctgtccttttcaaaactaagctgatccctgctgggattagattgaaaatagtgtaaaatttcagaatagtgctactattatatcaaaactatcactttactgtaactttagctgggagtttcataagactacaaaagtggataatgattttatcataaaactgtaaactttattgaactattaggctgggtccacctatttcgcacacatataatagcttcattgttacatatattgggctcactcatcaaacacatacacatgtagggataaaagtttaaatagtaataaaatttattgctattgttgcagctttatgaaatactactatctagctaaagttataggctcatagcaaagtgatcgatagtggtaggatatttgcaatccaagcagatagtacgtcctgcaatccaagcatgcagtactagaagctcaaaacaaacagctactccctccgtttcacaatgtaagtcattctagtattttccccatttatattaatgttaatggatcgggtgtgtttggttgcaagccacactttgccacagtttgccacgcctaaggttagtcaaatttgacaggtgtttggttgtagccacagttgtggcaagattcccctccaacaaattaggtcccacatgtcaatggctcaaaaaagtgtggcaagattctcttaggcttagtaagttgtggctaacaatttgatcacctcaccttaggcaaggtgtggcaacttttgttggcaagtaatggtaaagtgtggctgggaaccaaacagcccctagacatatatatctatatagattcattaacatcaatatgaatggggaaaatgctggaatgactaacattgtgaaacagaggaagtagtataactgagaattaattggaatactttagtttagaagtcactggccaacccaacgccaccaccatcgatcactcccgccaatctagcggatcgtgcggcggcgaccggcgaccggcgagcgagtgtagatgaacgtaccggccgggatcgacatcggcggccaagtccatcggtgctctaataataattaattgtacttcaggagcagcgcgttggcgcggccgttgtcggggcagatgcggacggcctccctgaggtcggcgatggcctggccgcggtggccggagttgaggagggtgcagcggagatagcgcacgagctcgatctcggcgcgcgccacgagcgcgtcggcgcgctcctccagcggaaggaggtcgtggtagccgtagccgtagcctgtgctgagggctgcgtcgagggcgctcagcgcgtcgcggcggcgctcgcccagcaagtggagcgccccaggcccttgacggcgaacggcgacgggtggaggcggaggagggagcggccgatggcgatggcgtggtcggcggcgccgacggccgcgagggcgagctcgtcccggagagcggcgggcaagtcggcgtcacgcgcaccggcgaggtgcttcctgccttcctcgacgaagtaatcgtgggcgtcctgcaggtcgccgtcgccgccgccgccggagaggatttcggcgaggaggcggaaaggaagagagaagatgaaggccatgagctccacaatctccgcgaggaagtggcacacccaggctccctgactcatcgccattgctaagggtcgagccatcggggagaaaggcgcctggaggggacttatttatactgtgagcagcgcggtaggtggggacgtgggaggggggcagtgtatgggaaactattctaatccgtcgagggaatgttccctcgtttgctcaaaaaccatctaaatggttatgaaatattctgaaaaaatttgacaacattcatacaacacatatatacaacttcacaaaatcttaattccaaactcaactcacacgtcgagatataaaaaagacaaattcagcgtatgaatagtagcgtattgtttatatctaaatttgtcttttttgtttctcgatgtgtagatcgaatttgaacatgaatttttgtggactagtaggtatcattatactctacactgtcattttttttcagattttttcacaactatttgcatcgaatttggaagaaaaaggtatacgaggggatggattagaatccactcccggcagtgtatctagactctggtagtgtactggttcgattgcttggtggttgggacaagaggaaaggtatctactggtggtggttggtgggtcggattcccgcattgatgggctggagagttacctattgagcttgagttgggttggagacgcctgggcattttttttttcatttctcttctctgctactcctcctttcgttccaaaataaacgaatctataatataagatgtgatacattagtttattttgaaacggagggagtcccttaaaagcgtagtcattcttccgtcatcttatcaccatgcgtaagaggtcgtgcctaggtgttaatagtgaaagttggtaaactccgaagtcatcatcggtctagagtatcggccttcagaatcatggaattcagccagattggattttttttcaaagcgtacatgtttaaaagctgagcccagcccagccatcctgctcccggtggcccggcagatgtccatctgcccactcgacggcccattaagccacaccgtcaaaccaccctcactgcgccctgggcccatccatccgcctcagccccccacgtggcacgcgcagtgcacgtagcgatttcacctcctcccaggggcaaaaccgtacttacccaagcgaggtaggttaacgagagaccagcttcctcctcctctcctatccccacccctccttactcctccgctcgtgcggccgcgtggtggtggagcctcgcggagctctgccgcctcactccgccgccgcctgcgttcgccgccgccgcgcgatcgacgcctccctccctccctccgcgctgggggtggatcccgccgccccactccccgaatctcccctcctctccggttcgtaccatcatcccctcccatcgtcgtgggccggatcgcgccgccgcgggtttcggggcctcctcgatctgctgcgctggatggcttgggtgattcggcttggttttgagggttgggatggggtcggcggtctacgggttggggttttgcgggtggcggtagggttttgaaggggagggggggtttaggttggtgccgttgcgtggatcctgatctggggtcgcggaggtgtgttgggagtcgtggtaccgagctcagttggtaggttgaatggagctcagatccccactggcgtcacgcttggatgcccgttgcgtgattttcttcagaacgccgcggtcactaagcatggcggttttgttgctggctgattatttatttattatatggtggatgatattcgtggaagataggaatacttggttattcgttataaaacagtacccatgcaggggtcgttttgtatagatgaattttggtggccttgttacttggcatattgaattttgattgccctttttggtgcatgcttttaagtaagaagctgttttactagtttgaacaataagatgcacatttattagggccagtgtagctcacggagaaaagacactgtggaggaaggaggttgaatatgtgggattttattcaataaatgcatggatatttaaagttattttatctgaagagggatataatccaattaaaagaagtgatagcttctgtaatttgcatgatctgcatatatatggggatcaatatgaaaaaaatattgaaattgtgatgaattcagtactgttcttatatctcagtttgttttgtaccatatctatttcccttcattttatttactttgaagcatttgctttgctccaggatagtgctcatctgagaagatggcaaagaagaagaacccaattgtctttatggatgtttcgataggtgatgaacctgatgaaagaatggtttttgaggtactgtgtggctctgcttcattattacctcgttgtcaaggctgaattatatggtcagcgttcgtagtacattttccccatgatttgcttagggaatttgaccaagttaggctagtttttggttagtaaccacaacttaggtgttaggtacatagataaaattgttcctttactgagatgatttgccatgctagaaagattctggcaaatggcaattcagcattcttaggatgtaaaacaaagaggcctgtaatttgtttattggtgataaatttcccttcttccatgcagctgtttgcagatgttgctccccggacagctgagaacttcagagcattgtgcacaggtaatccttcatttagcttgttctcaggaaaatatatgatgttatctgaagaaacatatgttatataattttcttacatgtgattaaactttgtctcaaaatcctgagctggaaattgcatagtctgacaatgtaaagaatcctacgattaaatggcattctatagatcaattcaagcatgttaatatgttacagttttgctatacatttatcgacaaattttctcctaaaaatttgacatgtaaatatagcacaatcgtagtgtaattacatcgtaacttacatgtaactacaatgcaacttgtatgtaattttcaaaaatcttgcataacatgctattttcacgaagcagaggtcatgggaccaaatccccttatttgtgtgtgtgttgtgattctttttcttctccacttgcatgaatcttgaagcggatctaacggtttcaaaattacatgtaagttacattgtagttacatgtaaattacaatgtaattacactactattgtactatatttatatttgactaatttttaaaagaaaatttgtcgacaaatgtatatatagtcccatatgttatacacctgtctggactgttttttttttttgaaatttattttttgtcgccacatcgtgataatatgactggtgtgagctggagatattcagaaatcacatcctatacagcaggcgatgcgaatataaactgctgtaagcttgtgactgctattctggtctaggagttatgttctgtaccatgagcattaatgttttgtttagatatctactcattatctgctatgttgaagtcacgtaataatgtcggtggtgttggcatttatttacattttggtctagtactctagtgcccacatattcaagaagcactttagggactagccttttatttaagaagtcccaccctcccttatttgtgacactgttgctcttgctaattaaggttgtcatctccaggtgagatgggaattggacaaacatctaagaagccattatactataagggatcactcttccaccgtgtaatcaaggggttcatggcacaagtcagtttttcttctcccttctttctttgttgttttatataccgtgcttgataattatagtagatcatacaatgattgtattatggctagcatttgtttgtgctatttcattcgtttttttagccagtttcctttctcctgtataatgtaggatgcaagacagatgatctcgactgcatttcttatcatatagttttttaaggttgtatgttgtgttactcttaaatggtttacattctaataactacaataccagaaagacttatttgctttgttatgcatgatttactaactgctttacttactttttttttcagggtggtgacttctcaaatggcgatggtgagttacacaacattctttcttctatacaatttttcatgtctctttctttcctatgagagtggaattaaccgtctgttcttggttttctcttgtctttttcctgaaataacataacgaatttatgtttcaattcatatagagagttcgcatgggcacaattgatggttgggatgggatattaattctggttaacctggtcagttgtttctgtgtgtaacgaccttaattcattgggatgcatttggcataactagagttgtggataaggactagatctttagatgggaggaagaacgaaagactggaaaacaaactttattaagtctcccatgattgtgtattttcatgatatctctcatgataagattttctccatgcagttgtatttattcttacttttcatccttttttttttctaaatagttgtgaaatgacttaatatacctgcaggatctggtggagaaagtatatatggtggaacattcgaaggtattagcctttgaactcagtatgacatcaattcattccaagtttaatagcagacaatctctagatactctatatatccattcagaatgttccttgcacaatccaaagctcagtttgtgttttctgttctgtgttgtgcttattttttcagttgctgctgaaatataattttttcgtcaaagcctcaagttttggttactgtgttatgttgtgcttatattttttaagttgatgcacaaacataaacttatcatcaaggctcaatttgtcgttgctattctgtgttgagttgtgtttattttttaagttgctgcagaaccataaacttgtgcccactgtgatttatttttttgaatgcaataatatgcctttgctaacttccattaaaagaaaaataagttaaccaaacacccaaacggctagaagcagtcgcaccaattgagattatggtgatctacctcaatgctaaacagggtctaatactaatcattggagttgccatttttttccttgatatagtacatgccatggtagtgttgatttccctgttggcactaaaattactgtagttctcatccacttatgctaattatcattgtggttgtattgaaaatttgcgatttgcatttcagatgaaaactttgtcctacgccatgatgaacgtggtctcctgtcaatggcaaatgctggacctaacaccaatgggtcacagttcttcataaccttcaaacataattctcgtcttgacaggtttgttcatatgagtactatttgaacacaagtctttaggctttacaaaaagaaactagcaacttaggattaaatgaattatactctgtgaatgaagtatttgtgtctgaaaacttggaaactttttgtagctaatcagtcttgtgcaacatttatgacaacatagtatttttatcttgagatgtcacatacatttttacactaagcagtgtggctggaattattgtagattagtctatttgaattttggatgttcaattttattttaatgttaaagactaggccactggattaacatgactgagttgaggtgtaatgtttgatattgtattgtaacatagcaagttaacaatggcaaaatggccactgatttctaacttagtactaatcgagtgagttttggtaatatcttactatctgcagaaagagcactgtttttggtaagcttattcttggaaatgatgtgctgaagagaatcgaatatgttgatgtgcatggtgctggttccacacctgttgttccagtaagaatagtggactgtggagagctcgttgatggtaaatgtcttggatccatcacggttgaaaacggtaatgcttgttcttttggtatcaaattttcaattttcaaatacacctaacctctatctaagcatttgagaattgttactcttgtaaagacaggagtgtacttatattattttatgatattcatactgcagataaaaagagatctgtgaaatcaaagttatccaaggatgaatcttctgatgaggaaaataatgaaggaaaacgcaagagacaccacaagaaatcttcgaggaggagaaggaagaagaagagatattcttcttcagaatcggagagctcatctgagtcggagtctgagttgtctgactctgatagtgagtctgatacttgctccagtgactcatctgatctcagcagctcaagtgatgatagacgaaggcgcagaaagagacactccaagaaggataaacacaagcgtggaaaaagaaagcgtgatcgtaggcgtgagagaaagcgcagaaagcgtgacaggaagtcaaagcaaaagtcaaaaaggtctgtttgcataaacaaattgaatattttgtcattccctgacacttgacgtgtttttttaaataagcagaatgttagagagtgatagtgaaaccggaaatgtgagtgacagcagcttggaggatgataaaagtaagcggcaccatcgtggacggaagtctaaggcctcatcccaagtttcaggtaattttctttggtgactgccgcatctgttaaaagctatagctgctcatatttatgtttcttaattatttaattggaagtaaattgaattggagtccttattcccaaacctgtactttcctaggccaatgaaccttttaatattattgagattcccataaacttgcactactacattatgccatattttattataacaaaaaaatatgccctttgcgcctattaagctccacaatcatcagttatggattatggaagccaatgttgaaccttctgtgaatcgttcacagaggaccatgcatgccaacataagtacttctctgttatatttagataaacatatgaatcttgtcgtgaccagaatatttcaaatgagagtagtggaagatccacatgtcagtaactatgtgggattagtatttgtttgttggttggcacttacggagttctacaactaaccagcctatacaattttattgccaggtgaaaatcacacagcattagctgctttgaaggatgccgcttcaactcaacaaaagagtgcaacgccaaggagtctagctcaagaagacaaatctccaaaggagaatggagatacccgtacaaatggtgttactgaatcaaaaactgaaaggaatgccgatattgctctaaccagcaatcgaagcaaatctaggtttcctatatttcttcacacatcaatcattctttgtgcttactgcgtccacgagcagtgtttcatctgacattgataagcaggagccagagcatgagtgctaaccactcaatgagcaagagtatgagtatcagtccaaggagaagcccagtcaaaaggtcagccatcagcccgaagatatcattgataagcaggagtcctgatgtccaaggccatggtagaagtcctgtccgtgctcctgaaagaagtgaaagcaggagcccacctcgagagaagagcatcagcatgagccctcagagaagaagtgcgagaagaagtaaaagcaggagcccactccgagagaagagcgtcagtatgagccctcgtagaagcatgagcaagagtctccctagaagtgtaagcagaagccctgttgctcgcaggagcaggagtcctgttaaagctcgaactagaagcatcagcaggagctcagctaggtctttgcagcgcaggagtcgaagtaggagtctggaaagatctcctgtacgtaaaagtgtcagccgaagccctccaactatggacaagggaagaagcattagccgaacctctggaagattaccattgcgaaggagtattagccggagcccagataggccttataggaggattccaagcagaagtcctcgaaagaacactcgaagaagcatcagcagaagcccagttagactatctaaaaggagtatcagccctgtaagaggtggtcggtctcgcaggagtgtcagcagaagtgccagcccacctcgcagggcaatatcacctgcacaaaatcatggtaggagcccatccaggagtccctctcctgatgggtcaaagcgggtaagaagggggcggggttttactcatcgttactcatttgcaagacaataccgctcaccttctcctgatcattcattccgttatggtggaagaggtgatcgtgacaggtaactgactaaacttttggattctaatttttttttttcatttctagaagttcaaacttaaatgtattttttgtagacacatgagttatcgaggctcccgtcagcgatcgcctcctagacggtatagaagcagcccacttagaggacgagcatcaccaaggtacattaacggcagtatcatctgattgcaacaattttgtgctttctcctcatcacctagccatgtctttttttacatgttattgttgttaatgtaatgttcatccttgagccaatgctgtagcctgtaggtatgcactgccctagtctagtttatggttcaattccatgattctgttttgtttgtcccttgaggcctaacaggtacaggaggaggagccgaagcatctcacgaagtcctgtttatcgagacagaggaaggggaggtggacgcagcaggagtcctgtgcgcagccgctctcctgctggtgggaaactaaggtcgcatggtgatcgctcgcgttcaatgtcaaggagcaggagcctgtctgggtcaagatcaaggtctccaccaccaatacacaatcgctccccacttgcttccctgtccccaaagcgagagagtaatgcaaagtcccggtcaccctctgccagttctgaagggaagaaaggtttggtttcgtatggagatggttcccctgattctgctgggaagtaggaatccatgaatgcatgtacaagctttggccgttgctcaacccatctgcattgcagtattgggaagctttggccgttgctcaacccatctgcattgcagtattgggtttgaaatgctacggttagagaagctattttgaggtgctgcagaagctgtttttgtcatcttagagatgttatatatttatggatggttgtgagttggttgaatcttgtctagacgatcataagccgaggttagctaatggtttcttaaacttgcaacacagtttttctggctgtaattcttgtgcgccgtggcagttaatgagttaaaacctatcgaggtacttttgttggacttggtggagatctgagttccccgtgaccttttccaatctggtgaaaccattgctgtgttcacgaacaatgatcgttagcggtcaacactggttccatagctcattgctgtgctattagtttctctgctgctacctgagtatcaggggtagaagtttgccgctttgttgttcgccagtcgtcactcgttaagttttattggcttttaaatactcctacgcacacaatgcaacatctgatgttaaatttaatactagtgtcttattgaagggcatttgtgtccccttaatgaagggctgatgacgatgcttgacttggtattattcttttttgtggtgacggcatgacgctctcggatgttgtcatcaagttattagctttgtacttgtttcgttctaaaatagctttgtactttcgttgaaaaatactacaccttcgtttcataatatatgacactattgatttttcgtttttaatatataacactactgattattaatgtttgatcatttgttttttcttttatgtttcattatttgtcttattaaaaaaataagtaaatttcttttcttttattatggcatgatttatcactaaagaaactttaagcaatatttacatttttttataaaacaaattatcaaatgttataagaaaaatcaatgacatcatatattaaaaagaaaaggaacgagtagtagtctagagtcaactaggttagatatattatactactctgtctacaaaatgataatcctaggcacaaacttgaatatgcatatattcagtttcataggtaggatttatttatttttttgggtcagagatggtatgtacggatatgtggttcttatattttactaagtgagtagagttttttaggagtactttaaattctgaacatgtgccatagaaaatgccaccacaaccaagtgccacacgggatccacaagtcgagagaaaggaaccgagacgtggccactctcggcgccaaccgctacggccaccccttcccattcaaatctccaccatccgatcccatatcaacggctggtgttccatccactccaccaccatcagttcccaactccccccaattcggaaaccaaaattaaccaaccaacccaaccccgccgccgccgatggacgccgccgcgacggccgcgacggcgacggccgccgctgcgatggtgtggttcaggaaggggcttcgcgtgcacgacaacccggcgctggacgcggcccggcgcggcggcgccgctgcgcggctgtacccggtgttcgttctcgacccgcggtacctccgccccgaccaggccgcgccgtccccgggctccgcgcgcgccggggtcgcccgcgtccgcttcctcctcgagagcctctccgacctcgacgcgcgcctccgccgcctcggctcccgcctcctcctcctccgcgcccgcgacgacggcgacgtcgccggcaccgtctgcgccgccctcaaggacgtaagcgactactcaccaatcaatcactacctcgttcttgtcgcaaattaatccctcgtggattttgctcgccaagtggagaaatattcgggaaattaacttgttgtttgagctcttgcaatcgcagtggaacattgggaagctgtgcttcgagtccgacaccgagccgtacgctctggcccgcgacaagaaggtcatggttagtgatcagtccacacttctcagcattggatttctcatgaaaccagaaatatttcaatctgttttgatcgtgcaaggatttcgcggctgcgtcagggatcgatgtgttctcgccggtgagccacaccctatttgatccagcagaaatcatagagaaggtaacccacaagattcagtactgtgcagacatgatcatttgttgatcgaaaatctggagtttctgtgcttagtttttattttcttttgggaaatggaagaatgggggtcggccgccgatgacataccagtcgttcgtggccatcgccggcgagccaccggagccaattatggaggagtactccgagctgccaccggttggagataccggggagtatgaattgttgccagtgcctagagtggaggagcttgggtatggggatatcagccaggtgagaacagtagcacacttgctatttgtttgaattttgatcatgttggagattttcttaattggatggccaatcaaacatataggaggatctttcgctgttccgaggcggcgagacagaagccctgaagaggatgagagaatcgcttcatgataaggtgattctgaaataagcgttttattcatctgcaatttgttcattacctctgaattttgatcaatttggaaatggaaatggaaacatataagaggagaatggttactcttgctatgaatggttacactctgataacatagaaattttcttttacaggagtgggtcgccaaatttgagaaacctaagggtgacccgtctgcattcctgaaacctgcaacgactgtcctgtcaccatatctgaaagtgagtcttactgcccctcataagacaatttttcttggcatctttcgtcagtgcatgtttagattgcagtgctgaaatgaattgttattgttgcagtttggttgcctgtcgtcaaggtatttttaccactgcattcaggatatttacaggagtacaaaaaaacatacaaatccacctgtttcattgactggccaggtgaatttatttatttatttataagagtaactaactacattgattcgctctgaaaagaaagagaatctaacatctgaatgtttgacttctgttcttgctgttgcagttgctgtggagggactttttctacacagtggcctttggcactcctaattttgatcaaatgaaaggaaacaaaatatgcaaacaggtctgtttcatttcatcctattacctcctttgctacaacttcctttgttcatcatgcaaataccttgtggttccagattccatggacagagaacgaagagctatttcctgcgtggagggacggtcggacaggatatccttggattgatgccatcatgattcaggtttgccctcacaaatccatagcaagtctgccaaataatgttccttgcttccgtctttgctccactttctgttacttccacttgcatcacctgtaactaccaaatcatgtgaagttcctgcttattttgttaactgccagctgaggaagtggggttggatgcatcatcttgcacgccactctgttgcttgttttctaacacggggtgatctggtatgtatgatgatctgtataatatcttactctgatattgattgcttgaacattttgtggcatgttaaccttttagtttttaaagatccctactcattctgatggtaaaactacatcttgacttcgtgtaaaaaatgtcatttgtgctaatagagccgtccgtaataacacatctaagatatttattgggtaagatcaaagcaacgtagaaattgtagatgctaacgcctacacaacttgtcaacctctctttcacatgaagtttatccactgggagaaaggtcgtgatgtctttgaaaggctactgatagattctgactgggctattaacaatggcaactggatgtggctctcctgttcatccttcttttaccaggtcagcaatgaaatggtcttttcaatcactaatgatctacatatttattcactctactagtttcttactttctttaccttcctgcaattttttttaaacagtatcacagaatttattccccaacctctttcggaaagaagtatgatcctaacggaaactacatcaggcatttcatcccggtgctgaaaggtacttgagcacaccatttcggcactggaaaaaaaagatcttttcatatattcagaactaatctcaattttgcattagacatgcccaaggagtacatctatgaaccttggactgcacccctcagcattcagaagaaagcaaactgcataattggcaaagactacccaaaaccaggtaaaagaaactaatttttttttcgccgggaagacactaatattttcaggtgctcaaaaggcataactagtacaatggctgtgtatttatttatttaacttcattctgatcgttccagtggttgatcatgcgattgcaagcaaagaatgcaagaagatgatgggagaagcttatgcgtctaaccgcctcgatgacgataagcctgacaaagggaaatcctccaattcttcgcgaagaaagctgtctgctggcagccaagtgacccctaactcatccaagactaaacaactgaaaagaagcagctgagctgaataattgtgcagcatgaaaattgcttcagcttcacactaaccgcttcatttccagcatgagagaatttcagttgtgagtcgacagcgacagacagcctgcattctcagttgtagctagtgtggtgactactgaactagtctgaattaacagcaaaaaagactaaataaactgtagtaacatttaaccatgtaattaccatcagttgtaacaagtagtgaacatatatctctttctagtttacatgaacaagagaggttatctttcataagtacaaatcctgccaaactcgaactctatcttgtcacatacttaactctgattgatggacatgaaattaatgaatggatggtttggttgctttgtacgaaaccagaagctagacctgaccaaacacgtgaagccaatacataaaacgggcatgatgaacaagccagctctaatctgacagtgcaaggtgacgacacggataaacccatctttacacatcaaagagagaaagagataaagaacactaatccaggattagcaccaaagttcgttttcgaggataagatgacatcagacagagaccagaaaggtttaaaagaattacagttcatttttcatggtgggttaaaaatggcagtgaattagtttagtacagacactgcatgatagaactatttatctgcatatttatatttatttaattccctttctttgtgtcccaacaaactctgacctgatttaaacatgggatggaattgaaagggatgaatgcccaactcatgccatcgaccatgcttgtgacatgcaacaactgtgaaggatctcattattgttaatcaatgaacacatcttccttttaatttttgtccaggaagatgaacacagctttcatgcagttattatgttggattagaatcacttcttttgttttctccccccaggttatctttccctgcaccacaagaaaaggaaaaccatgaaaccagctgatccaaaaccatgggacaaatggaaaacaacaatgcgtgaccaataagcctgccttgcacttgttgttttcctttgtacagtggccctgattacaatataaatcaatgagtcactttttgtttagggagatttattttattgagaaaaagccaaagttgttttaatctctctgtccccaaatataagagattttgaatagatagagcacatcatggtactaaatctagacaaggagcttggatatatcctatccattcaaaattccttatattttaagatggagagagtatagaagggatgctaagaaacttcaacttaaagtttgaattgtacttgtttgagaatacgaaggtttgccttagcccttaaaaccgagattgctattgggcgatcagtcgcgcgcctccctccccgcgcaactggacacgtgtcgcgcgcggagagggggcggcgacacgccgcgagggagcgagtttttcgttttttttgttttttccctttttttcgtttctgttcggttttttttctccgggtttttcttttctgtttggtttttttctccggtttgtttttttttcccggtttatcttctttcggtttttccccttttttttttaagatgtataaatacaaagtttgtattcatatatataccaagtttgtattcatatgtatagaactttctatacgcgcatacaaactctctatgcacgtatacaaactttctatacgcgcatacaaactttctataggtgtatacaaactttctatacatgtatacaaactttctataggcgtatacaaactttctatatatacatacaaaatatatatacgcgtatacaaactttctatacgtgatgtattttctatttttttatttttagtgcgtatacaaactttgtgtatgtgtgtatatattttttatgcattgaaatatattcataaatatatatatacgtatgtatatactatatatatatatacacgtgtatatatatagtatatatatacgtatatacataagatgtaaatagtacctatgagataatagaggggggtgactgaccgcgcgcctccgcgcgcgcgcggctgatcgcgtatcagcaccccgccttaaaactcactatcttggcatccacgcaattatgagtttataaaaaaatctataaacccttagtttttggtgtgtcaaaagggttattgagtagttttttttttaaaaaaagagtactgtgtgttcatcttgtcagatgtactctttcagaaaactttaatggtgatggtgaatgatgaatctatcacgattcaccactaatgtcatgtgggattcaaatcagtaagtaggtgcagatatacatacatatttagtagtagcaaccttggcatatatatgtaaaaaaaataatgcctttattgttagcaaccttggcatatatatgtaaaaaaaataatgcctttattgtttattacaatgggaatatttattataattttgggttttagagtgcacggtggggttgtttgttttgagcaaatgttagaacatgagatgagaaaagccccttagcataaatatttcagatgtaaaagtatatctcccacaagaatcctatgaaattcttgtgttccaagtggtgtcaaggtggattgtaatttgacaaatggatttatttgcttcttttttgggaccatcatacataatgtgataataggaaatgctcaaatcttgtcggatttaaaattcaaaaaaaaggaaaaaaagcatattaaacgcttaaaaataatttcaatatattttatgaaaaaaaaccatataaattttgaacagtgcagtaggagagccacaccatacagtcacaccatctgtgccaagaaccgacacaacccaagagagaggaagataccgcccccaaaccaagaaccccgcccatccacgccgtccgatccaaatcggacggccaggatcgcacgccgaggtggtggaccggatgcggttcggatccaacggctgggatgcgactgaaagcgccaccacgcaacgcaaccctctcttcgattacacgtatataaatccaaagggattcccctcccccaaaaaaaaaaaataattactaaaaaagaaactaattccctgctcttttatttcttcttccacttctcgattttctctcctcgtcaaatccgcgcctcgtagagggaggcaagaatcgaggggtccggtgttttttctgcgggatcgtgggggaatttttcctcggatttttccgtgctcgtttccgccgcgggcggcgtcgcagaggttcgttgctgttctagttttttttttctagtttttttttttacgtaaatcttttggttgtttttttgggggggaggcgttttgcttggtgtatccgcgcggggatggaggcgggggcgagagggtggggaagagcattggttgattgattgggtgttggtttttaggtgcggtgatttcctgctcgtcggttcaagttttttttttttaaaaaaaattagatcgttttgctgcgcggatttggtaggatctttgtcaatgtcatgtttttttcccgaggattgctgatggtaaaagtatgaactggttggcaaattcgcttgtggtatcgagtcaccctttgatggaataacctgttggtttgttgatttgttcacctgttggctgatacgttggttaattatcttttctccctcctgataacgctggggaattgtttcttcccgatacgattattacttggtgtagatgttcgaagcgattgctgatgtagattattttcgtttagagtattaccaacgatctataaattttgctatattttgggaagcatgtagtatgattttacagatttgacgtatgacttgcacttgttagagaattttatactatctggcacctatactccttccatcccttgcaattagacagcattttgcatggaagttctagctgatgtgttcatcttcggattaggaatttggtacacctgattccatttaattagcactttgaaattgtcatagtttagcctaaaggttgcttacagctaaattatatacactaaattgatacactttcgggatgcagtagccgagtaccattctgtagtgaatttaatggagtgggaatatatatcatccgtgctttcttctgaatgcgctagtcttgttgcggcgtcgtgccattttgttctatatctatatcctgtttaatatgttctacaggtctaaatctttgtcatgtcttactgacaatctgaataattcagttactaaaatttcttctgatcttgttcacagcagtgtttgagaaataatacgagtcaatgaaattccgcaaagggacaaaggtggaggtgttgcagaaggggggtgcgccattgggttcctggaggcctgctgagattgtttctggcaatggacacacctatcttgtaagctatggctcatgtccaactcagggtagtgtggctgcggaaagggtgccaaggaaggcaatgagacctttgcgcccacccttggatggtattgtatgctgggtcaaaggtgagattgcagaagtctttgacagctacacatggaaggttgcggaagtggtgagattgcttggttttagttactatctcgtcaggctccttggatcctccctggagttgaaagtacatgcatccaatcttaggataaggcagctgtgggaagatggcaaatgggttgctattccaaaggtaaagttcaccccttcaaattatcaaataacagttatttgtatacaaactataacctatgctaattgatttttccaatgccttttatggaaattaaattaagtgaaacagttgatatcacctcgttttgttgttccttaaatggtccagctctattatggagcttaaccgcttaaaaacatttctctagtgttctatttgtgatcagataaacattatagcactatgcaccaatttgcatttgctaataaatcttggtaattactttcaggattctgcaagattccctggtgattcacctagaagccagttgagatgtggaaaagttggccatgagttggtgcatacttcaagggacaaccgtcttctactgaagaaaaagaaagtatatgagggcaatacttctcagggcttgaagagaaaatcatctgcactatcagctttccccatgcagtacagtgaagtaagtaagagatttcagacatcacatagagatggaaggtgcctgcctgttgttcctggaggttctcttcatttgatggataaggtagatgctgttgattcccaatgcttagagctgggcgaaaaatacatgcatgattccttaagtaaaagagcaaatggctttcataaaacaaatttggcagcagtaaaagctaattttgattatctggatcctgctgtaacaactcaagatagtgatactgatagtgtcgtttcctctgttggtagttgcaatccctgcggtagcccctatggatcaacacatcctcaagagtatgattgtgcagatatttgtagtaggactgatgatgctgaagtttctgtatctggaagagaatcgtttagtaggactgatgatgctgaagcttctgtatcaggaagagaatcacctgctcctgttaatgatggtctgaaagagaaaacccatttgcttgagttacatgcttatcgtgcaacactgatggcattatatgcgtctgggtcaattagctgggagcaagaggctatgatgactaatctgaggcttacattgaacatctcaactgatgaacatttatctgagttaaggagtttggtttcctctgaagttcattctagatagtcatatgaaacagtaggtgtctgtcttggtggttatgtaggcatatcacttattttacaattgcagagtcatggccagtgttgaaaccacatccagttggagtacttgatgttctgtattaaccatggaaacaggttgtatgatagatttaccataacttctcaaatgctacctttgccccaattaactcaaggctttcttctttaatggaactgtctatttaacttcatagtatcttgtaattgttttatgctgctggtgttagaacttttatttaatgatgatggcatatattacaccacttgataagtttctatgattcccttttgtgttttacagttaaactgattataattcaataatatgatatccaatgaaatttgttcttgaggttgtcaacttcagctatcaactattatgtttgcattgtgttactttagcgatcctatttgaccatgttgagttgtccatcctttggaattcttgtgccaaaaggtacatatactgctgcactgttggtagaataccctttaaaacactacattatgtgtaacttattatctgaacaacatcctcccctcttatcctatcattatcctgatactgatagatgactactagctggtaacagcattttattcactgcattagaagccacacatccttttaatttcttttggatgatttgttttcccttgacaatggtgcttgtgctgcactagaacaacaaaggaaaatatgacatctaatgtttctcatgcattttccagggccgaagttggaggcttgtaaagcatccttcggtaggtccatgttgatggaggattttgtcacatggtctacatggtgatcaatgtggcaacatttccatcaaactttggttggtatatacaattttccatttatattatttccacttttttctgctccactagattttgcacgaaaatgaaaaatgaaattcgtttttatattaatcaacaaataaatctgagtgctaaagttccacatgcattgttgcaacaagaatgttagtatcatggtagagaaaaaaactacgaccagagaatctctatctattttgctcagaatatgttgaaatttcttatagtgctgtgtcttatcttttcctgttttctttatctctggaacaagaataccaaaaggagtagttagatatactatcagtgaaaatttctttaaaaatgagtaaatttcagatcacttcatgtatatggtcctagttgcagagaaaacttgtttgcttggcaagttgcaaaaccctaggttatgaagtttttggataccttatgaccataaaatctgcactctagtgaaaataaccaagaaaactgggttctgtacgactatgactgtagagcatttttttccgttgaaactaccaagtttgaacctgtaaaatggtccagaacaatgtgcatatagcttaagtcgtagttttgtttatgtttcttgcaatcagcaggatgaggagtacaccataaatgtaaaatttaatgtatgtttgagtgcaaaattattagttatagatacttagttatataattatttaaattgaaacttgataaatatatcatggtcacaaactacaccagtaataaagtacgtatgtgtgttttattttgtggagtactctgtactctgtagagatttgtcctagtcatgttacaatcttaacatttcttttaagattagtctccgaagttcatatctgtcaaagtcttgtagttaatgttgtctttacgatagtaagattaattggccatattccagaaattcagggagagcttccataatgatatactactactattttggcgatactgagtggtgagctgtatggctgtaccttcaacatactttgatgaggtagtgaatcaggtaagtaggcatattgttcattgtcaggtgtcagtagacagtacttatacaatatactcgtatttgctaattgttttccgtgacgtaaactgtatatcataagtacttcctgctacgcgatttgactctgacaagtgttagcacatatgtggtaatgcagaagttatgtacagtttcttattaacagacaacagttatgaaggagacatgattccatatctggccttgttgctgctgctgatggtttggtcatttatgtgcatgtccttttacatgattgttcttggtgtatatataattaatctggttcattgttctgtttcttcttttgtcttaaagaaattttatatcatgtcctgtatagtgataacattcagttttcttcctgtgcatatcgtggcgctttagatcactggtattctctgagaatatcacaataatgattctacatatgaaatgaatattggaccattcaatacacctagcctatgtgtcaactggaacattttttttctatctttacaaatgcaagaacatgtaatgggatggattttttttttgtcacatataaagtagtcacatacaaaggttggcaaataacaagctaccaaagcagcaacgtgggaaaatataactgaggagatgcagcaacgtgtgtaaaatataatggaggagaggaggatcactgtggtgcacaaaagctttttttttttgttgttgttgtgaaaactaattacaactttttatagcatgtatgtatgtacacaataagagggtgaaatgtaaagcattaactgaacagctgatgtatacatgacttgtttctgaagcagtatggaatataatcctctttttcagccagcctttttacttgcaactataagccagaaatgcttgggagtctgaatcgagacattattttcaatcaagacgtagtcttaatgttactaaactattgaagagtttttttttaaaaaaaaaatggtgacacaagtgtggatgaagtgaacccgagcaaattttgacttgtctatatttgatacttaaaccactcctgcaattttaataactcatgatatttatttctatctacaaaacatacaaagttttgggaattctacagaaacaaaaatgtatcacttgccctggggtaataaccaaagttactagtagaaaaatgctgatgttgtttgtggacatagaactgtacgataacattactttttttttttggtgaaaagtcatgttcttatccattttccttgtgacttcattacttgtgcaaactgctttcgatcgccacaatattttcacttgagaaagaaaagagaagatactgaataattaggtgctgtggttcccctgggattgccaacaagaacagattggcaaatcttatgcaataaaaggtttttgggtgcaactccatagttgatctcaggagatcttatcagaacattgtgtgcgaacagaacagtcactttctgtatttttttcagccgacatgtggatatagcagagctgatgactttattgtggctttattgtgacggcacactttgatgcgtttggtaaccacatttgcaggcttttctaacaaagattgtactattgcttcaggtggtcttagtctgaagcagagctgattgaagttgtgctccatgtactcgtgtcagtacaaaagtttggaggtagctattcgatatttctggaggagaatgtgtggttattcaatattataatccagatttcaatttcgtttgtactactgctgtcaaggtaaaaaaagaaattcgatgtaaatgccaagggaattctcatggcagctttattctcactgacctgggcaccctgaattttctcctggtctactctgtccccatttggcttgaagcattttccttccacttgttcatgcattggaatccaagtatataacaacattataatctcattttggaaaaaatgggttgttaaaatcactatttcggatgatttcttgggggtggcatatttgtttccttctggctgaatctcttctttttatgcattagcagagcacctgaagctgtgctgttcatcatgtaacacacctttttcactgcatcatccattggtgtgtcaatagcacagataaagcagctagcaaacagatccaaggagatataccagatgtctggaaaagcactatgatctgaagtttgtgaagtcatccatcaggtatgcacgcagcaggttttctaccgtatgattcagtttagccactcatagatgcgcgtgttcacacgcaaagatatactcactgtgtgttatgtaagagacccgcaaagatatattcactgtgtgttatgtaagagacacttgtttgataccatggtccttatccacctgctgcttctcttagttcgatgctacaaaagtccatagttttgcaattctgcaacacttacttgagtatgattctcattggtttgtttctgccgtatctgttcgtcgatgatttttattggatatagttgttgaggttcatcatggtatgtgctgatagctagtatgctcatagtttgtaaactaaatagcaacgcttttttgattaagctgaacctaccaaattggaggtaaagaggcatttggatagaatccaaactgtatagttcagaacttcaaaatttcaaatgcatgattgccaatttttgtcaatagattgataaatcttggatgtgagagaactgttggatgcttgaaagaataatcgcaaggcacagaagtcatatcattgggagtgaataaagctacgaaagatactgactggataaagctatatatgaaagatactttggtaagacagtaaactcttcctgatcgttctaactgtccaagctcagagattgcaacatggaagaacatgtaacagtttttagctatcaactgatttattttggacgatcactgttctcttctggagtttgggagggcagaatatacaaccatggatagtgaagaagcaagaatcatatacaatttaatttccttggatggtaaggaaatatcttctactttttgcaaaattaatgatttctaattattgcttatgggggattctgcagcctgcaggtaggatgtggacttattgagcaaggtgaccagccatacttgcccttttctactgacttagacagccatgccttctactgacttgacaacaatatatgtccttttccacacaaaagatgtgctcatattcaggctatttataatagatgaaaatatgtcaacaagattcctacttcagattggctcctagataggaacaagaaaagagagtagtcatggaataaagctagatgctctagagatatccttttgtcctatgcatgtaagtctactcctttcgtcccaatataaatgcacttaggaccggatatagcatttcatagtacaacgagatattggttatactatgaaatgccacatccggttcaggtgtacttatattaggacggagggagtacaaaagagaaattactggcaagaaaatttgattttcagggtgatggtatccgcaggtaagtttcacatgcaaatgaaaatgtaaattgtctgttaacgagtgattgtgttagcataaatgtttttcacatgcaaaacaagactatatgcaattttgcagacttgatatacttatgcctggtattctaagttttatatacagagtgtaaaggttagacatattagcaatttaatggtttttggagattgacattgagaataagcttatggttgaagaagacagggtagaagcatgattgttcacacaatgatcagaaacggaggcaagcaaagttaacccaagaaaaaggaaaaatcagtattagcttgtaaacatggctagtttgccccaacattaggattgcctcagaacgatcctctatatatgctcaaacatggtataatgtgtattgaggctgtgttcgcatgtggatgatgggaacatagtgcctccgcacggaaaacggagcgttccattagcacatgattaattaagtattagctaaattttttttaaaaaaatggattaatttgattttttaagcaactttcatatagaaactttttgtaaaaaacgcaccgtttagcagtttgaaaaacgtgcgcgcagaaaacaaggaatttgggttgggaacctagagttcgttatactagtcttgaacttggtgatgcatgaaactcaatatcgtatttgatcgagcaaggtacccatatgtaaagggtttcttctacaatccaacagtcaggtccgatgctaaattaggactgttaatagagcataatcggacgatagaaatcgatcagtacctctaggaactgttcactccattatgtggtggaagggtaaaacaatatttttgcattagaaataaatcatcgtctatcttagacgctctttacgaacgaggattgaaaagaaacccttatggcctcatcgtttagcatattcatatgcttatcagctaaattttgaatttttaacattaaagttggagctgattttggggttttttcatcgaagtttatttttcagcctttgcttttagatcaccaagaacacatattgattttcgtttgcaaatatgccatttgcatatttagaaaatataccaaacgatgaggctgttagttttgcaatcttgaataccttagggatagggtttggcgaaggcataaggtttgatgctcctggagtcctctttagcggtggtggtgcaggggcttggtactcctggagctcgggggaggggatctacggcgtagcgaagtctgcggtacgatggagaaatggggaaagggtttcaggacttgcttctcgcccgatcgtagcccttggattcaacaaccatatcaagcttgctacctagtggttacaaactgctggaccggaataatgctcatatatatagaaataaagctaaaaatacattgatgttttggcaaagtgaccaacatgtcgggatgcaattagttattcatcttgcaaaatgtttaaacgagtcactcattttttttaagtaaagtgaccagcgatccataaacttttttatatatgctatgctattcagatccccaaaatttaaaaatatgcatcttggacatgctggtccaaaattttgttaattaaaaatgtatcatcccggtccaaaattaccacggcacatccgggaccgagcgtttcatgtccactagcacggtgcccatcttggacatgctcccgaaactaacatgatcagcaactcgtccagcaatttacacagcaatttgcaagatgtgtgactaaattacatcccatatataacaaacaagtacagaatctctctagctagcatttggtgtgtttgtgtgtgtgtgtgtggttgtactggctgatcatcgaggtttatccggcgtggatggccggccggggtggttaattaggcagacatggacacgaccaagccggggaccaggcgactcccctgcgccgcccaccgcctgcctgcatgcactgccacactctgccactgcagcagacgacatggacattcagcagcagcagcagcagcagcagccagagccagcgtaacgaacctagctagctactcttacgcctacctatctcatcattcatggcgccgctagccgctagctgctgcagctgcacctgcaatcgcatccatccatcgcgtcgatcgatcgatcgcattgtgctgcgtgccaatggcaatggcaatggcatcgccgtactacgttagcatgggcgctactactaccgctctagtactacctgtgcttctttctcacctcttcgtcctctcatggccattcgatagcttgctgctgtttctgctgcatctgcagagagtgcagactgcagcagcggcagcagcagcagcagcagcagcagcggctaatgtccttgagctgatctgatcgaacataaagcaattaatacactatgtatatgtgggcatcaatgatcgagcagtagtacgtgcgtatagtacgcatgcacctgcatacacccacatgaattcttctgttcatcacacacaacagtgtcagtgcaatgccaatgccaatgctaatgcaatgaactctctcgatctccatcgaccgatcgatcgctgcttcttgcactgcatgattgcatgtacatagatatgatgcatcgatcgatctcgatcggttgatccgtcgtcgtggctcagctcgatccctccctcctgccatggaaaagaaaagctgcttcttgcatcacttgagcatacgtactgcagctctgcagctcaccagcagcagctgcagctgtgtggctatccatcgatcagattcatggctatctagctacctctctctctctcccatatggcattgccatggcaaatgtactgtagcctgcagggccaattgcaacggttcattcattggtggtgcaactagctggctaaccttctgatcgatccgttcatttaggcgcagcagctagctagcatacatgtgttctgaatctctctgacgacgacggaccacgcctagctgcttccttgttttcatcatgtgggctttaggctgtgtttagttcagtgcaaagtttagattttggttgaaattgaagatgatatgactgaaaagttatgtgtatatgacaggttgatgtgatgaaaaaggactgaagtttagatccaaactaagcctaatttacttcgttgtagtattctgaatcgtttactagcattcactgccgccggccattggttacattggtgtatatatatgcagtttttcagtctttcagagcctctgcatgcataagctcatcatacacgcactttcactaggtacacttgtgtaaacatctgcagaggcattgttcatgatggttacgttcatcatattaatatcatcgatcgattattggtttacgcactacgtgaatcgtactgttggggaagaaccactggtgtggtggtagagttatagcgcataactctatatacgcattatgtacggttcaaaccatgatgcccacaaatatgattgtgtgcattcttattggtgcagaggccggaagtaatacttacattacctgaaagaaaaaaaaaaacactactacatgcatgcagtgcagctgtattgcaggtagatagccacctctcatgtgctggacatgtgatgggtgtatggtgcatggatagagctaagggatgagtagtactgtcagcacagtgccaccagcaattagggtactggaaggagaggaagggagatgagagagcttgtgccatttggcccctagctagctagggagaggtaagggtagccccatgcaggcatcatctccatccattcattccatctctctcaaataatttccttgctttcattcttcagtgctgctgccctctcttcagccagtagtgagtaatggcagtagtagcacacacacactagtacctctgggactattgtgtgtgtctgtgctagcagcctctcatctctctctctctctctctctcatggtctcttttatttgttcttgggatcttggtctgcacaagcttggcatttgggcagctgcaacattgcctttttggtagtgaccaccagatttttctagtagaggtgctggtgtcctgcatgctctcctctgggctctctctctgatgatactgatcatatctcccactgatgatagctgatgatggatgggggcagtgcttcagttaagattcttgtgccatcactgcaactgtgcatgctaatgctgtgcttcttcagtactacactactctgcataagttaacagccactagtccagctaccactatactatatctactatccccaatttaattagataacagcagctagtactaccactatatatgcacatttttttagatataatactatgcaaagacagtattactatttatcttttgtggcaacaacaattccgtgcattggaaatctgaacacacatacacaagaacctagttaagcaaagttagttactctagctatctgactgtcgttttcatgctactgtctatcttatgataattttttagataatactatgcaaatacagtgttgctactttaaaatcttttgtggcaacaacaaatcctccacgcattggaaatctgaacacacacaaaacctagttaaacaaagttagttaatctagctatttgactgttgtcatgctactgcctgtcttatgattatgttttagataatactatgcgaatacagtattgctacttatcttttgtatgcattgaaaatctgaacacacatacacaagaaactagttaagcaaagttagtcaagctatatatctgactgttctccatgctgctactgtctgtctttatgatcatcttttagataatactatgcaaatacagtattgctacttatcttttgtagcaacaacaattccatgcaatggaaatcggaacacaaacaagtaatctagttaattaagcaaagttagttactctatcatctactatctgttttccatgacactgtctgtcttatgatcatttgtaatatatatatactttatagtactactgaaataaggtgcaatcagccaagcagaggatgcttaggttaacgggccggattagctgtcagtaagtaatccggtcttcgatgatcgccttctcgttctctgaacaagtaaacaactcaaaattaaccatctctttcctttcctctaaagaagagcaagtgtggatgttgtgtgacacaaagccagatgcatgctactatatgctattatagcatggatccttctcattccataggattgcagcaaatgttaattagttttgtcttaattaatcgcagctaggggtactgtaattaaggtggccatttgccgctctttccgggacagactggctcaaatcaagggcaggcagctgcagctcaaagcagcagtccaaaaccagcatcctctacctctctactctagtctctagagagagattgtgtaggtagccatggaagcaagtaaacaaattactcagtggcaaaattgactaacaaattaagtaattaacggtgatggatcagaggcagcaaacgtggagctagggggatttacatgggagattgcaccatcagtggagtgtactagtactagtagtagagatcatattgtatataatcaccaagatcataattaaataattagttagttaattaatcaagtggttagcatggctagctagctagctgctctcatgtggcctattaattggactcacctcggatgtctctcaagctgagctggaaaccatgagcaagcaaagcaaagctaagcttaagctgccttgcacttgcagtactctcttgcagtagttgcagtgcagtgcccaagttcatgtcatgccctcttggcgccatgtgccaaggacactttcatatattccaatggcggccgccgccgtatcaccaccgggatccatcggaacagctgtgccgtcggttagccggacgatcatggtagccgttgggacttgggattacaggaattttacatgaatcagttcattttggtcgggataataaaaagatattgttagtcgtcgtgtttaggtagacgtgtacttgaacacgacgacgattatcattttcgataatgaactaaattgatattaaacatttgtggagatgatcattcgtattattatgatattagcatttgggaatgcaagaatttttgttaggataataaagagaaattgatagtcgtcgtgtttggctgaaaagtatcattttcaataatgattaatgaaggatgtaaatcgatgatttttttaaaaaaaaattgtggagatgatcattcgcgtgatcactctcacaatctctctcgagtagaaaagctagctaagtaaggccaagtactcattaattgtgacctatttggtttttagcgattcttctgaactccaaaggctgttcattaattgttcagatcagcaaatccatgaactatgcaatgattagcagcacgcgagcgagcgatcgatcgagcctcgagctggccgtcacacaaattctaatagtaccacaacaattaatctaggaggaggactggaggagacgccatggatgttgttcttgggatgccaacccgttacgttcttgggatctcgatcgatcgatcggttttaatctcctcgattgcagaggagcagaaagaactaatgtattctcaagatgtcgctgcgattcttgttcttgtttatttactgctgtcacgattacagtttccaggaagcgatggatcaacgcgaaaccgaagcagttgtgcaagttcatcttgttcttgagacgtactgctactctcgatcgctgaactgggaagcttccgagctgccatctcgtgggcattcgatcgacctgtcgcgagctagcaaattaaagcatactcgcatgcagattatagttttttttttgtgagaattccaaggttttaatcgagtgcagaagatggcaacttgttggggtttctcttgggagatggtgcacatctgggacagctgtgagctcaaagaagaagaattattataatttataaaccagtttctgaaagtacagtagtagtactaactaagaataagatcacttgatcaacacacacacactgaaagtctgaatatgttgtggcgaaggacagttcttgcagtactcatctgcagataattaaccttgttagccatgatgatttcagtttgtttatgcgttgacttagcctgtcaataaatagtgctgttttcagttgtcactgaggagcttgggaccataatatctgaatttttatctctctctctctgagtcccactgatgaatgaggagattttgcactcattttatataaaaagctggcttctcttgtcgtttatctcgtgcaatcacagatagcaagatcattttcagtaagatcagtagtgtatatatatatatatataatgataattccttgtgctaatttctgaagtatccatgcaaggttgttgattaatctagtaaatcaaatagagtaaagctaaatcatttccctgccgacactgtagagtgcactgttcctacttctgaatattttcatttctgtcttttgatgcatttcctgctccatgcattcttgtgattaggaacttcataagtggagaatgaaagtttaagttggggggtcaacctccaatatttgtcggttaattacgcgctccttgaataccacaattgctgttgcatgctaatcattccaagagttgacctaacgatcgatcgaatcccggttttcaatgccatgggctggttttctgagtgattcagaatctttcttccatggcttgatcatgctcatgccagttaagagtgtctggtgtgctgactaagcatgccaatccctgcaggcatttttgctagggcatcatttcaagtgccacctggcacttgtccttcattactgcattataactttgttattaggaagatgattgcattggaagttagaactgaaatgtaagacaaccaacttcttaattgcacatgttgccatgcccatatgttactactacttaaaaaaatcttttggagtcaaatgctgcttgcttccatgatactttgaggttgccaatgcaatctgagaagccagaaggaagctgagacttgtgtagtagtagtaccctctgaatttactgacatacaacgcgtcgaaatggaaatttttttcaatgcacaatttgcaataccatttttttttcatcgtacggcgcgtggattggatattattataaactctgctgcagatgataggtgtcattctgtttgctgaattatgcagcacaagttggacacctctggtgtcacttgatgcatgcaaattgggtgagtcacacaggtgaggcagaggttctgtatatatatatatattcataggagtttgtctggtgattattttacttgtgaatcattcatgccttgcttgtactatgtcatcccttaggagtgcattggcattgtgcaaatgcaattatatatatttatatatcttgcaaacatttataactgggatactggtgagctgctgctgaattggaatcatggaatattagcatcatccccaactatattctgatctgccacagttgaactttgggggtgatagataggcatgagatgtgccccccaaatatagaattgcagatgggttgtgatggtgtaggggcttgaagggacatgagaatcagagtgagcaatatactagtgaacaccctttaattttgtgtggtgagtggtgagtaggacaaaatgcctagctagtgcctgcttgtgaggcaccaaagtgagctcctgcttcctaccagccatcccttccctgccatgaagggctatatttctgaatctgatagcaccattccatccatctcatctcctatctgaaaactgtgatcaataatgcaccctgtactgttccttctcataaccccagttgtttttttttcttcacactgcaaaaaatgcaatgatgtagcatatcatgcttttgtttgtcattagtaggggctgttccctaaagcaagggaattggctatgcatacatgacaacaaaatctgcacactttcaggttattgtctgtgacaacagatcatgcaacttcattttgtacactaggctagattgctcccccctcacatcttttcaggtcacattttgctaacaaaagggcacgctttggctgtcgaaaatgacatcgattcttacatactactcgtgtctattgaataattagagtgggagaggatgtactgagtaattgtaattggataattatgttgaggctcaacgggccggtagacgtagagtataagagataagaaaggtgaactagagataaagatgactatgaaacgaatcacttgtatcctaatatctctttaactgccatatactctaacagtgtcggccgagggcagctgccatgaacaaagggaagtgcaaaggataaaaaaaaaaatccttctgaaacattggagacaagattgcacatcttgagaggctgatccctagcaataatgccatgagccattgagaagcacatggctccctccctatatattttatcagaggccaggtagcagtaactgcagagcaagtaaccaggtatccacctctcctctcccacatgcctttcaaggggaccagaatttacacacatgacacaaccaagccagaccactctgaattgcaccaaattattggagatctcccaaagatcaatgagttgtggggggtcagaactcagaaggggacccccccaatctcatctcatcctcctttcctcctccctgcagaaggtttgcagccaaatggcaatgccaagcaagaacacacacacaagaaaatgagaggaaaatgtcaatcaagatgtgcagcagcagcagcaagcaatagcagcaaactgaattggcattgtcacccacagtgggctaagctagctgtgcttcaggatcacctggtgagaaaatgcaacacaacacaatgcaatgcaatcaagtgtggtggccatttcttgatgagaggaggggcttttctgctctgttcatcaatgattgatggcttccattggaccagtgatttggaatgccaggaaagaggtgtacttttatttttttgcccggtgtactatataatagggccttttggctttggggggctgcctgcatgctggcaaatatgggcacccctatcttgggaccgtccgtcttttagcaacctatccaacgcaaacatcgccatccacactgctctctacctacacaatgtccctccctcctacccaagataattactgccttattttgtttagcatgaccactttattttaagaaaaatctgaaagtttgtgaattgagatgttattatacgatggtctctatactgtaaaaattgtcattgaacctttagcaaggatcatggtacgttagtttaaacttatctgaaatgggtatgtttatttgagatggtaccggaagtggtcgcattctctagcgcaaaacttgatatctctaggcaccaaaatctttagtgcactactgtaaatttctgatccaaaataatgaaaatgtaattttttttagacttgtaacatttttttacccaagaagttttcatttgtgatgtcatacaaactttgctgtcagtagtttttttttaggaaaatatatttatgccattgctcaataaataattcagagagatagaaaaggtgcagcacatgtataaaaaacatgccacttcatttaagtggttggaccagtaaacaaccacacacacacatttcattatcacgatatggtccaacataaatcaaatcaaccctctggtagtagtacatggatgttttgccgttgaattgctggtcgaaaagctcatcaacctcttggaaattctgtgttcgatgagttctcactcctcaggattcattgggcaaaaattacttcttcttagcgtgcaaaagaattcgagttcgacattgacctctcttgttattttcttcttctttctcaaccactcctgcatcatgtattttggacattactagtagcttacaaattccgtcgttataacccagcaagtaaagcctggttcctggcgttgaagcgtgtaagtatatcgtgtgcatacgaaaccactttgccttgtcaacaagaatattttcttttgaccagagtcgacatcaagaagtcatacctctagaagtaataaaatgacaaacgtctcgaacgaagtcaaaacggcattgccagatcatatctacgtctctatcaactacgatcaaactcagcttagcaagtctagcaaaggataacatcaaaaccactccacaacaaacccatttttcccccacccggcaaccaatcgtacgccgtttgtatgatcaaacataccacacttcaaggtctaagttcaaaatcttcatagaagcaaatttcagactggattgtttgaggagctaagttcctaatttaaaaataacgcatatattcgtttggatgtagaggccgaataaaaaaatactcaaaaaaaaatcaaacataccatccatcatctactttccgaacaaacgatctacgccgcacaattcatctactctgcaaacgatctaccccgcgcaatcataagtaccatcatcctcctattgctacgcacatcgtaaattcacgcacatggtagatctcctctctctctctctctctatttctctccatgatcttctcctcgagatgcaggggggggggggggcatcacgcaggcgctgtccgttttcgcgcaactgtttggaatgctccttgaggcagtggcagctagctccaaaggacaggcaggcaggcaggcaaacaccagcgatccatcgatccgtcgtctctcttccccacccccccacctgctctcgccgtcgccattgccggccacaccgaccccacacctcggattttggctgctccctggcctcctcgtcccacacgccctagctcatcccccccccccctgccttcggattattatcagtgccggccattgctagctgctcgatcagtcactcactcactgggtcactgccattgccatgcatatgcatccaagcctcagctggttgatttaattgatcttgtttttctatttttgatttctttcatgtgatggaatttttacctgtggctggatcctggatggatagtggctaagtagcacgtgatcagaaactctggggttttgttgttcctgagcactgtagcattttcaggttggcaccagaaaaatgcaagttggtatgcttgtgtatatagttgccacggtgttcgcgaaaacctttttttttcttttctgtaagtgttttgggatggagtgaaatcttttttcataatatgtatttgtaactatctaaccacaagtttttaaatcatatttcatggccctttttgaaactgaaccttttggtcacgtcaataaccactgaatggcatactgccacacgatgacggatgccgtggccaaaaccttaccactcaactgggttcaaattatacgctcaacttaaataataccacccttctctagtgaatgtttttttttcttttaaacaagagcccaaatggttgttaaaaaagaaaacaagatactggggcagagcacatccaactgacagtcgcttataaactttgtcgaaatgatgaatcttgtaattaagttgttgtaggccaggtatgcctgcacaaattggatcaccgaaaacagagctttggtttgttaattaggcagttcttgtatattaagcaggatcaccgaccacagacacaaagaaaccggcaaaagaagaggaatgccgtgtggaaggtagacaaaaaaaccacactaaactcttttttctttccttctccaaatattttttttccctgaattttcttcttctcgtatagaagacatggaataaaacctctatacaattacatacaccagaagccataggcaaggcaacaaaagaaggggcagagagtgggccccacgttgctgtgtgtcatcaaatcttaaaaaaggctggtctgatccggtctgttaaggagggtattcttggcaacctgggtggggcgccaaggcacagtctaggacaaaaagttagtgcttcttggctttttgtgtcacttggcatgggctatacacaggagggggaggtgatggtggagaggggggcatttgggtcaatttggacaatggaagagggggctaggggcccgtcgaatcgggtggatgtgatgagagcgggcggaagatcaatggcgctccgtattgcgggtataggagcatcagcactgtcggggcatgtacgtagttcggggatgtcctgatctcgaaccgctggaggaggatggccatcgtgagcttggcctcgaggcgcgccaggttctggcctacgcacatccgagagcctagcccgaacggtatgaacgccagcgggtgcttcgccgccttggacgcgccgttggcgaaccttgccgggttgaactgagacgcgtccggaccccagtatctcgtgtcgtggtggatggccatgatcgggacgagcagctccatgtcccgcgggatcatgcacccgtccgagagctggacgtcgaccttggctcggcggatggtggcgaccgccggcgggtacagccggagcgtctcgttcatgatcatgccaagctgtcacatgacaaggaatgaacgtatgttagcttgtcaaatgacgagaatgcccttatgcaaggcaaaattcggaggagaaaaaaaaggcattgaatttggaatcgaggaggtggtggtggcctaccgttttgagcttggggaggtgctccttggaggggagctcgccggcgccgcagacgtcgaacacctcgcggcgagctcgctcctgccaatccgggtgcatggcgaggagcacagtggcccacgtcaggaggttggtcgtcgtctgcttcccggcgaagaagaaggtcttgcattcctccagcatgtcctccacggggatcgccgccgccggggagttcttctcgccgccggcgttgccgcgggtggcggcggcggcgccggcattgatcatcaggccgagcaggtcgcggaagctgccgtcgtcggccttctcgccttgctcggcctcgtcgctccgccggccaatgagccgcatcaggctccgccgtatctccctgtccagccgccatgacagccggttcttcttggtcggcaagaacctgcgagaacgcgtggttttcttggtcaattcggggtcggattggttggagatgggatggatcaatggcggcggcgagtgacgtaccggtagcccgggacgagcaccttgcggaaggcctcggaggcgaacgccatgagctgtccctgcatggcgaacacgacgcggccgtcgtcgtagctgcggccgaacgtggcgcgcgtgatggcctcctccgtcaccgcctggaaccactccgccacgtccacctccacctcgccgctccccccggcctccgccatcgcgccccacttcgccgccagcgccgccaccgacttgccgacgtgcggtatcaaccgctgcagcagcaacaacaaacacaacatgaaactcatccacgagcccgcccgcgcgcgcacgccatggacgaacacgaagaagcagaggaggtaggaggtaacacgtacgttgaggttgtccgggtagaaggcgtcggtgaggacgcggcggtggagcgcccacttgtcgccgtggaggctgacgagcccgtcgccctcgagctggcgcacgacggggtgcgcctcgtagcggtcgaacgcgtcggcgcgcgtcaggaagatctcccggatcagctccggctccgccaccgtcaacctcggcgtcggcccgaaccaaatcaagaacctatgccctgcaacacacacccacaccatcaatccaaggcccaagctcgaacacttccatcatcaatggcggcgccaagaaagagagagaaagaaagccataacccgagctgagctgacaactaagagacaaaagctgtgagctctggccacaagcagacacaacacagagggagcagggcgaggagggaacagatcgagcagcagatgcaaccaaaaatccatccactgcgacgccaccacatgtccacagagcgcgccgcgcgcgcacatggcggcggcggaggcgggagcgaagaactcaccgtagatcttgcgccagtagtggtagaaggcgaggacgcgggggagcgcgttgtgggaggtgggcggcgacatgggcttggacgacgcctccgccatgagcgccaccatctccctcacggagccgagcaagaaccggtacggcggcccccgcaccccctgcgccgcgaagtgcgcctccagccgccgcggccgccaccacagcgcgtccgccatcctcgccgccacgtgcatcgtcacccacaccgccgccgccgccgccaccgccgccaccctccacgtcgcccacccccaccccgcgccaccgccgccatcctcctccatcctcctcctccccccctgtttcttgaaacagagctcacaccaccgagcagagcaccaccaatgagacgcgcttcgtcgcgaggtgaggtgagcttgggtggggtgtggcaatggcgggtcgtgggaggagaggggttatatagtgggaggaggaggagaggccggcggcgatggggccgggagggaggagagagagagtagagagagaaagtatagagagagagagtttagagagagagggatttggttgcgaagggtcaacgagggttggggtttggcactttcttgcttaattgaccacaccatgtttgggagatggatttatggaaggtgaagacgtgtttggtgacgatttcacttcacttttttgtttttcgaataagaggtttcacttcacctttttgtttttttttcaagtttgttaaatattggcaaactttttggaaaaggaattcttggttcgtgagaaccaattcgcctcctcatgtttagtgttttgttttctttttgcatgtgatctttggaaaaagggcgcacacacgctttggttttggaaaaatttacgcgcgtcttctatgtgatcggcagtaaaagaaactaacatattactccttttatatctcatgatataagacgtgatcaaaattagcacgatctctaaaactaatctttaatttataatttttcatatactataagctttgtagcaataaaattacaaccatatgaaagtaaatttatatattaatccaatgatatattttttagcaagtaaaatttatttcatattataataagtgttggtcaaatatgttaaaatatgttaatggtttaatcttaaaatgcgtgcttgtcttttattatgggatgatgttttgcattttcgtaatggaagtatatgacctacaaatcaatttgccactaaataagttcatattgatgttcagaaatgactaagtgttaatattaacatgtatctgcatgacttcttagtcatatacatacatatatatatatatatatatatatatatataattatatctaatacatttttacttttttccatttattaatttaatagatcataaataaaatacgaggatgcccttgttgattggagccgtgatttatttttcttgactaagtaattgaaatatttggaataagtaaagagataattttaatcgataagtcttattttggtttcatcattatttaataattcttaaatttataatcaataaagaccaatatgaacactcatctctaatttttattttcaatatttattacattattttaataatttttaatttgaatttgatagttaccaagttgcacaagcctttctaatccaaaaaagttataattcaatccccatctacatggatggaaaagagcacacctatactctttttgtcaaaattacccggtttatcgttggcataccgagatgaattattttacacgtcactcttagaggaagtttgatagtatagctaactattaactattactccatccgtcctaaaatataagcaattttagatatgaatctggacaactgtgtgtctagattcatagccaaaagttgctatattttgggacggaaatagtagctcatactaaagctaacatgtataataggttaactatatagttggctctattttttctcttctttctcttttctcttgctatgaatttaatgtaaatgtattggatcaggtgtatagttagctttggcacgagagccaacacttctcattcttttacttttcttttccacataagcttatagttggcttatagtccactattatccttgctcttagaggaagcttatacgaagcaccaacatcttcgatatattaacttgaattttgattatagcatgaaaaatgatcggtcgacatacatatggaattatggcattgtcgtacgaagctcataaggtttttatgggaaatatgcaaatccaaggctgtcgatccctattcagtttcttaaaaaaaaacacacacacacacacacattcaaaacatgaatttggcatatggttatatataggtataagacagaaaaaggaaatactctttatccgcaacaaagtggctattgggcagcttggcttaagctccacatgtggcaaaacgaattcatggaaaccagaaaattaactttagctagaatttcaatgggaacttcaacatattgcaagctaggttcagccctacccttcatacaattttggctccgtccctgtatttttttttttgaaacttaagaaccattttatttattaatcagaagctgagtacatgctggatagtacagttcgcagagaagtatagacaaacaataaacccaagaaactcagtacacaatgtttttcttctctatttctattataaattatcataacacaatattatactatatattgatcaaaagcccaaaactgatatattaaaaacgtcactttctctctccatataaacgttactactactactcgttacacaggcaattagcagcagcacacagcagacaaaggcacaatggccaataggagcggcgatggttgcatgatacggcgtgatgattggccagattcttgggaagacgacctctcctttttttgggtcctctaaacctgggaaaagagcgtcgcctcagcctcacctccttattggccgccttttctcaagcattttgtatgccctcccggtgacaggctactgctcctggatggctgtctgatggcgaacggatgacctcgatgtgcagccatttggtataccccatttcgtgtgcgttttctggcggcaatgtgcttgtgtggtggtgatctatttcgttttcgtgtgtgcttgtatgattaggggtgaaaacggtactgaaaattcccgatcggtcgagcatcgtttccgtatcagggataccattttcgtttgtaccgtttttttggctatttataaattttgtttttttctatttttttctgcatcatattaatgttgatattgagtagtttaaatgataaagatactagttgatctaacatcctttttgacaagataacagtagcggtagctagctagctagcttcatgtgattgtgtaggcgcgtgatctcgactgacccttgaacatggggccatatgcttccgccaggggcggagctacatgttcaaaggaggataccagaaacccggtcaaaaaatttttttagctatagtttatctattttcaccgtatttacgtatacctctctagtgcaaacttaagcacctatatcagcttaaatctggtctaaaacagagtaaagcaagtatgtagcatccctcttcatttcgttcttgctctgcccccggcttccgtggagggtagagatataatcattttcatgttatctgagaaaccgatgtcctatagtacatattgtttttatctcctctccagcattaaatgactaattggatcatactgtacatgacaaagtcattcgtacttatagataggctttattacgaatgccactgaatgagctttctcaaattcctatgtacaacaggtttgatctaattaattcatgtactccctccatactgataaaggggaagtcgttttggacagcgacacggtttccaaaacacaactttgacttcttatttatataaaaatatttattaaaaagtgatatatgtatacttttatgaaagtatttttcaagacaaatctattcatataatttttacattttcaaactcaacaacttgagagttattcatgatttttattcccaaggtttgacttaaatattgtcctaaacgacttcctttacgagtatagagggagtatattttttaaaatcgacgcctaaaaatatattatagattcaccgataattaagtaccatatataggaatattgtttgtttctgactcgtgcacggtacctttcaacttttcaatggctaaaatagctcattgtaaatatgtcactatgccggtttttcctatttatgcacagtaaatccactgctttaatttgaccaccctttttccaagataatgttgaacacattttgaaagacacatatacacggtgcttacactgttgccctttcataattgctagagccatacgtgagcacaattgaagaactgtttccaggtagacaaaatgcaaatggcacattaactctctgtttgtgcctgcaatgccatagctcaacatcgatagcgagagatcacagggcagccagtgcagcaagccttatctctgtagtttaggcacttggcactttatatgatcaatcggctcagttaaggtttgtgtgtgtgctagctgctacatgcatggatggtgctctgctcataattgaactgtttttccacagtgcttagcaccccatatacgtggaaggatcaacatcgcaaatacaaataatttttagttcaattctttttggatttaggatttttggattaatttatagcaacacgtacaagttcagttattcagaataaacattacggttttttatacttctcgataattatgtgcttcgattataccaaataaattattaagctgttggagaaagacgaacaaacttatatagaatgtaagtgttagaaactgatcttattcttatttgtgtctggtttgtattgtacatgttagctagaaatatttatggatataacattttcaaaaggttgaactgtaaaaaatgttgaacttgaattactccctccattccaaattgatctacatataattttttttgaggttattcctaaatgatctacatatttgtgttcattcattaggtctattcgttatttgtgcattggagtaaatggacattgatgcatgcatccatgcacacaagcatttataacccacatgcaatatcttgatttgttattggctaggaaatagtggggatggtgcatgcattgagtttattgctagagtaaatatagtatgagagagttattagctttttttttgtcttggtgtacctatgaaatatgtagatcaatttgtaatggagggagtatatgaaagtacttatgagtacgtgtttcttccttttacattagagcattatatacagtgcaaaacatattgagaatattgatcaattaaaaaacctgataaataaattagtagctcagatcatgccacatgaactttatgctcatgcttgtcctataacagatgctatcattgtatacagtacacactgatcatgcatatgtcctaaaaacttggccgtcattgtacacacaggtcatgcatgctaagatcaatctattccaataaattagggacttcgtcttttctattttgatgtgatttatcagggaaatatcattattatgttgcagcctccaaacctatggtacatctacataatggggcttcaaattatataatatggatccccggaaaaaatatataatatggagagttgttgtgacaaattaaataattaaaacatgaacctgccctatatttttttaactactaacactagcatttttcactaagattttttttataagaaaattcttggcctgttttagtactataccatccattatttttttctcaaaattattctaatctcaagtatcctaaggaccataaataaaattaagcatatatacccagcattatatgttgtagacgtggcacgtgcttgctggcccggcccaactggcacatattcctgcatgctgccgaatagagctaaatctctctacacactacccttaaaataagagagaaaaagaccatatacactatttttctgttccctctgaaagtatattaatcatcgttatgcaacttttattattagtttttatttttatctgcgtgaatatattttcagagtccacataaagaaattaaggggagaattgaagttgtagatgaagcagacatcaccacggggtgttttttttttctttacaagtgccaatgttaatgaagtaataagggttaattagatccatgctactacaaatttacccaattaaaaaaaattattcatcaaagtggttcagtgttattggtatttgtttaaaatttaaatattgccattatgtatgtctcgaacgcagttggattggctcttttcatacatatttttgtacaagaccaaaaatacccttagtccttagaggctgacaaataggaccatcttgtcatacttatcttcaacttcaagcatcaaggaaaggctcgccaatggaggggttggcgacaggcaggtggtggaggagctggtgctggagctcgccagcggtgacaagacgagaagcggccgatgggggaccagatctagctgctgcgactaggcttgtcgagcttcggatcagccactgcagtttcatccctagccagatcccaacccaccaccggcctcatcaagctctcatgcatagcgagatcccaactcgttgttggactcgctaagctcccacgtgcagtccagcctcgtcgagatcccgacccgccattgtcctcctcgagcttcctaacttgctgacggcctcattaagctcccgtgtgcggctagccttgtcgagctcccaacaagccgctggtctcgccgagctagaggaagggttggggaagaagataagtctgacaaacgggtccccacttgtcaagctctaaggattagggccattttggtctatgcgaaaatacggtatgaaaaaatttggtccaactgcatccgagatgtacataatggtaaataaggttgaaattttataaaatatcaatgacatttagctggtttgatgaatagtacttgtattttttttagtgagggaaatttgcagtggcatggatccaattaacccaagtaacaatatctccagtttgagatgctccattgagtttttatagtgtcctgagtgtgatatagttatttccaattttaatcaggaccttctcgatcaatactagaaatgcctatatatatctcctaaactccacataagaacaaaaaaggcaactccatattatactagcaaaatcattaagattcttgaaataagagaatttcttatgtacgcctttcagtttttgctcaatcccccaatttttgctatatcccccatatcaccttatgtctatgagttttcatttgacctccatatcttctattcctttagttggccatgaattaaccattagattttttccccctgaaatattatattactcttctcttgtgtacttatgctacctacttaaaaacataagtatcgatgtgacaaaaggttaatttataataaaatcaaactgccacaattatttgaccccaaaaatttaaattttcaatggaaaattaaaaaatgtaatgacatctatataaaagtttctcccaaaaattgaaaaaactaaattgttttcatttggtttaaattttggtgaaaatgttgtacaaatttcatcaaatccgattttttttagaattacacagtataacactcacaacgcatgcacgcaaatcctacccctatgagcatctaccactgaaagtacaaagccaataaatcctagaaaattcgctcccacggggagtcaaacctaggacctaaggtgctactgagtctcttgtaaccactagacgataggccctttcgccatcaaatccgatttgaaactaattaaataccttaaattttatttttaaaatatttggtcaaacaattatgtaattttttttatataaatgaatatttttcactgtacgaactgtgtttttgtcaataagctactagcacataagtatgagataatggtaatatagttattttgaaaaaataatctaacggtcaaaaaatgaaatgattgtaaaatatttcaaaataaaaactcagcatataaagaataattcaaaatttaagggaacatgaaggagattgagcgaaaacttatagacacataggggtttttctctatatggaaatactaataagatcccttagcttaatttgataatatattgagttgtactagcattactagcatatttgataatatattaatttgatagtatattactagcattcactaactgattcacctataaacgattagactcgattagacgacagcaagcaaatatcaaggctgctcaggacccacgtagagtgcacaaactaatgactgtcaaaatgataatatgcatgtgggaaaagccaagaagctaccaatatatgtggaccaggtatattatttgataagcaattaagtagtcaccttttccattaagtcaaatatgtgcccaaagagcaacttgcttttctcacaaaggacaaataaatctatatctcaaaggccagataaagccagagaaagtagagatctatcatagacaaatgccaaagaagtaataagcccttgtaggaagagcccacactgttttgttaagttgtgcaaagcagccggtcactattatatgaacatcgatcgatcaaaatatggtttggtgtgtttcgcgctttcaagcaaaaccagaaagaacatatatatggctcaaaactatatttttttcccttgagatagggtctgtttggggagcttctgacagatggagattcttttagaagctactattgctagaagctcccccaaacaatttaaaattttactcaaattctgagaagctatagttatataatctagaaaatgaactaaaagccagaaattgggttacccagcttctttatattctcaccagctgcttctcagaatcttaagttcctcgaaacagagccatagaaagacgcgcgcgtatgcaccacacacaaacacctctacttagtgttacaattagctgactttgttgttagttagttacatgaagagctatactgattatcttgttttcactccttgttcagttggctatataagcgttgggtgttagctagttacattatgactcaattcggattaaggtttaatctatcggtttcgcgatatctatctttccgaaataatttgaaatttgaacaaaacttggtcaaacttggttttgcttcaattcacaattttttctttgaaaattccaaaatttcaaaaaatttattagggaattttgaatcctaatacaagccaataagatttgttgcatcaaaacagtttttatgagaacttttaccggtgcatgtatggaagcacattgcaaatctatatcattttacctggtattatgttgtttttgttgccacacattatttttttttctcgtcctctgccactaacctctacgaaagaggaggaagatggggggagaagaaagaggaggggagtgaggcagtgactgaacgcaaaacaacatcactacgagaatccggaagagctctagcatgcatatcttatggaaaatggacggttacatatgtatgtttgcacttgacaattcctctcttattgaagctttaagtgtaattgtaatctattaaaattaggcacctattctaatatataacccactccaacggcttgtaaactgaagtaacattttcttattttaatgtagcatatatatctcaccttaatttaaagaaagctttagagaaaatcccttatatacccctgaaatttttcctaatcccttctatacccctgaattttgcttacttccttatatacccccaaaatttgattttgatcccttgcatacccctcccgtcagttgaccgttagttgaccgtgtattttctataaaaatgaccattttacccttggatgaacaaagaaattcatgaattacattattaaaaatataaaagcttctcgcatgagactattatagttatgagtttgttgtgcgatgcattatttatcccaaaaaaatatttttagataatgaaataaaaaaaatacgtatttatttttttaaaaaaaggtcataaaaatgaggagcattcatataaagataggtataccaatgttcacaacatttttttttatgaatgctcctgataaaaaaatccattgtcctattaaaatttcaaataaaaattttaattttttacatttattttattttcaaaatttatgtcaaaattttctgcactaattatttagtctcattagttttataaaatgcacacgatgtgcactcaaacaaaattttcaattatttttgaagcttatatttaaacctaaagcatcaagggcaaaaaagatatttgcaaccaaacgtaacagtaaaatgatggaaaatgtaacggtaggggcatggaagggatcaaattgaaatttcaggggtacagaagggatcgggtaaattttagaggtatgaaagggattgagtgagttttcaggggtacacagggaatttactcaaagctttactacacgagattagcatcagccactatatagccatgcttcacatctggattctgcaaattaattaacttccatcatctaaacaaaccaaaatgtacgatgacgaaattaaggtggttaattagctagcttgagaggcaacatatcctatgcacacaggccctcacgtgtacacacgtgcacaccaactaaaaaatgtcaccaaaaattctagaaaaaatcatacacatactttcaattgtattacacctagggttaaaatcttaacgtcaaattcattatattttagccgtaacaaaaaaaaacaaaaaatctgacagttttaaggttgcaattttgtcagaattttatcttttttgttattctctatgtagaataaatttgaagatgcgactttgcacgtagatgtaatactattgaaaatacatgtatgaattttcctagaattttttatgataatttttagttggtgtacacggtgtgtatacgcgagggcctgtgtgcataggatacgctcctagcttgagaacgggtatcgagtgcatgaactagctagccagcgttattgtttttttctttggtcgatcggcaatcgaggaaagaatatcgatggatggatgaacaaacatcggtcccgtttcctcggcacgcgaccgatcgaaagacgagcttagttgctagctagctgccaatcgagacgagatctggcctcgatcgcgcgcgcttgcattgcatatattgccatcgttcggcgattcccacgatctctctcgcgcatataatcgcttaatttgcagtttgcatgcacgcgcgcgtgggtatatatcgatcgatcgataggccgatggaaacgaaccaagcacgcacagcagttttctttttctcctttctccctcgctacttctatctatcatctttcgtggcgccccaggcgaaagcaaattaacaacggcacggcggtttccgcggccgccggagcggagcacgatgctcgggtttccgccccatgccggcctcgtcgcgcgcgctcgagtacagagaatgaacgaacgttcctggccctgtggcttggctagtagtagtagtagtaacggcgtatatatgtctcgatcgatcgatcgatctcttggggttttcgagccacggatccatccacacgcggccggcgcggctcgggctagtgcgcgagtccccccgcctctcacctcgatctcgcatgctatggatggaccacgtcttttttttttctgttgttgttgttgttgtgtttttttttttcgagagatgactagatgagcactctgtatacacatgcaaaaatactatgcatacgacttctatgtacaatccttgtatgaatgctaacgaattaatagtgaactttatgtgtggtgcatcgctaggaaacgacgggaacatgtcacgggcttacgcttggaaacgttacatcgtacgagtgtcgtacatgaaaaatcgtatgtatagcacctctcatgcatgttcgtttgctgtcacgaggttagttcgttctcatattacgtgtccttatggaacaagtgcgtgttcatgaaatttataaacttccaatttatataggaaaaaatacaaattattctttccttttaaaatggtataagtaattaatgtatgcacgataaatattactccaagaacttcttgattgccggttcaaaactggcatcgctgaaggttttcgatctggtatagtaagccgacgatagtgttgttcgatctgtcacttcctgaattgaattggtacggttgtgttcaatatcaccgtccatattatagttttgatactcatagtaaactaggataacaatcttgacactagctaatatgtagtataatgttgcctatatgaaatccaaggtagctagtatgcattttttttaattgaaaaattcaatatttttttaatatttgatttgccacacacttaggatggcgtgacaaaaatcaccggccattgtaacaatatgaacaacaacaatatacttactacagtagtatattacaatttcaatgtagctagtatgtggcgtggcaacatttaattacctgccacactaattttttttagcctctcattgtctgtttgttagtagccaaaatattagttttaaaaacttaatttaatttataagagttgattttcttgcttttccttataacccgtgaataaaatagaaataaaagttttatctatatagattatttttggcagctttgtttatttttatgtggcttatcagccatagatcaataagtttttagttctttctctgcaaattaaataaaaatgttaaaaaaacaacaaacatactggattatatatctgtatatgaccacaagtttcttggatttatctctccctgtccaaccttttcactacacaaataagtactaccactagatctgtttgcttaattttgttttggtttgtttcatggggtgcatggatgatcgatcttagtggtggtcacagcacagggataggatggtccagactgagaccgaccagaatggcggtgatttagcactacatatattatcttacaaaacaattgaaaatttaaattaatcacacgacgcctgaccggccggaccggtcctagctaggacagaagtgcgccgttttgggggcgcatccactgcattcggtgcacccatatgcatgcattcatgttcatcccccttcaaatttgttgcttgcaatcgatgctctgatcatcgatccatctctgcaaacctaatccactccctgtgtcaactgtcaacctcacatgctgctactataaacgcccccatctaaaaaaactacttctgactatgtatttaaacgtaggatatgttcagatacatatccaaaagttagagcttttggatgaagggagtatataccgtttgacatactttctctgctttttaaatgcacgagacaatttgaggtatgtttaactattcgttttatttaaagttgtactataaatattttatttgttatgagttgctttagcattatagataagactgatttatatttttttacatttgcactaattatactataagatgaataatcaatgtatgtcttaaaaaatcaattgcgtcagatatgttttacctagctctgtgtattgtgtatatatatatacttttgagcccttagaagaagtggcccgcatgactgaaataattgtaaaatgttccttttttttaaaaaaaatattgattagtaactattaaacccatatgtaaaaattgatggcttggttacgtacttacgtcctcgcaaggatttaaaacatatagttttcctgaaaacctataatactcatactccatcttttcacaatgtaagttattatagcatttcctacatttatattgatgttaatgaatctgtatagatatatatgtctaaattcattaacattaatatgaacgtggaaaatgctagaatgacttacatacattgtgaaacggatgaagttctatcctacagttaaaaacttgccgagccatatggaaaacctatataatactagcctatagttttcctgaaaattaattgatgcatgcattgcatatacgtgcctagattatatatatacactcgtacaagtaagggatgtctcaacgacgcatatgcacgcacactcaattggtgacattaatgcacatggacgagcctaattacaggaattttatcatcaaattaactaattaagtaagctgtaggctacatatatagctagctagggtcaagagatatatacagagactaggtaagacgctagtgtgcatagggtcaaaacatgtgttagcaaagcatctaaaacatgtgaggtcgacttattagttatcttagttatttaactaagcctccaatggcatcgtatatagtgtcaatgctaagctaggagtagttagaaagttataatatggagaccaagattgttaaaatcgtgatcctgaatctaatttctaaattaagatcggaattatataattgtacatatatataatttatattatcataaattctacctctatatagaattttagaatcagatactccctccgtcccaaaatacaagaagttttagagttggacacagttactaagaaagtaggtagaaatgagcggtataagtttgtgattggatgagtagtggaggtaagtgggaaaagtgaatggtggagggttgtgattggttgggaatagaatgttggcggagaagtccaaagtggaattcactctattttgggacaaatcctaaacgttaaaagttattatattttgggaagaggggaatatcttaattagaatggtagagtcgtaaaatcgtaatgacggaatggatatttcgacaatctctagctagctagaggacttgttagatccagtgaagtgcgtgtgcttaataatttactttggtctggcatttatccacgataatcttgtgtttgaaaattttaattaagctctggttgggtgaaattaattaagctggagttgctagagttaataaaaagttagattgcaagttgagacccgtaattaacgtacatctatcaagcgtgcatatatatgcctacttgacacgaaacttgcatgcacgccccaattagctacgaattcatcatttgcacgcaaagatcatgtttttaacctacttttagagatttggcagcgtgctaattttaatattactagctagccatctagctggctaggtaaaacgtgcaagtaaagctatagctttgtttttcatttatgtaacaattatcgatcagcatcgagtagctccccgattagatcaaccgggacagctagctaatatacatttgcacgaaggtttatgtccatgcaatgccagagtcatatactatagaaagattttatggattatttataatttgtactatgaggattttcagagggcaacaactatctatggctgtgtttagttccttccaaagttgaaagtttgggttgaaattggtacgatgtgactgaaaagttgtgtgtgtatgacaggttgatgtgatggaaaaagttggaagtttagatctaaacacaacctatatataccacgaatatacgtgaaactctatccgatctcttaaggggatgtccactcactttgcatgtcgcttaaaaagtaatcaattttttttaaaaaaagtaacatatatcaatatgtgatatgtcactgcacaaacatgcatattcaaatttaatttatacaagtagaaacaaaaataagaaatttgactacgaatagaacgtgtaatttgcggtcaaatttattatttttgtttcgaattgtataagttgaatttaacttatatgtttttggaaagatatattttatattaatctatcttaacattttttttttcaaatatcttaatgacttttaaactctatacacaaaacgaaggatgtccctctcgagaaataaaaatccacttcccgaatatgctagtagtgagagcctgggtagccatccgatcaacccataggtgttggctccgccattaattgcgcctcatatatcggcaatggttgaatgtgtgtgttgtttatagaaatgatcggtgataattttatttcttttttgcaaggagtgatagcgataattttgattagccatatatatgtattgatctgatcagcagaaaacaacccaagaaaatcaatctgacctaacttagctgctacactacttgcgtatgatcgagcatgcttgcctaactggactattataattgaggacacatcatatctatgcatagctataatcgatctttttttttagaactataatcgatcatatggatgtacatatagtgatagtactaccatgcatgctagacattagctggggacactgatacaaatgcaccaacaattaatgttgtagaggaatatacatttttcttttgccaaaatacagcttcgtatattttatttccagattatggttgtgtacacaatggttttaatgttgatgctacacagaacgattttaatgtactttgacccttggtgccagctagtcatttgacttccttcgtttcaaaacaagttaaattatttctagccactgaacttcaaactagctagtacaagagatgggaggtggggagccaataaaataccctttattaataaaaaaaatagtattgataggtgggtaagaaatattgaaggaataaaaaaattctcgatttacgaataagggtagataagaagatacaactccctccatccaaaaataatttgggtataatgaaaaacaaacccaaaattaatatgcgtacaagagtgtagacgtggttttcattgggctagaatcagtgtgtcacgagaacgtttgcttgctgagggtatgcatcatgacacgatgtgcggcacccaaaatgacaatgtaggagtacctcgattgacatggtttaaatttagaatataaaaggttttcattgtctttcgttttggtgcacaaccgttgtacatggattaaaattatatggagggaatagaaatgaacttatttgggacatgttagaggctaaaaatatatttttattttggaatggaggaatagatatcctatgtcaattgtacaacaatataataattttgattgtacggaattaaggtgtcgttgagttaattcacagtaacttattaagtgccgatcgagtagctacacctatgtaagaccaaattaacctaacacaacatgtacttatggatgaaaaaagataaatggatgacaaaaataatttgaaagtatagtaatgcctttgatgactctagattgtggaagaattgacacatacaactagaagtactagaaagttggtgtctagttggtttgaatagaaattaagttagtatttcgttgatgtgacctagaatttcatattgcgagctagctattagttagctagcttatcatcattattcatgagtactagaggaggatacaccaaacatggctaagaaaatcaattaattgattctggagtatgatgattgagcatggacttaacttgtatttagtcaaacaattaatatatatcgaccaacagattttgaatcatggtcagcttatgtcattcaatttctcatccaaggtataattttgtcggccaagcgggtgaagaattgtgtttctttgcgaggatttatttttctttgtgagaggagaataattgtgttttaatttggtactagatatactcctatttctaattaagaaattatatatgcacaaatcttttaaagaaacttggcgcatttatttctatgagatctaggttgaaagagaagggtagtgtacgtgtcgttttttttctatgggctgaaattaataatgtgcaccacaagcacattattatttttatttttatgttatgagcttccattattaaactaaaagttatggtacgtacactcgacccctttgatttgtagaaaaaacatagaaattttggaggttcaattctatagaaaaatttgctatgaaggtctttgaaacaaatgattgaatcctatcatatcctttgcaattcctatggaatagacaatcttacagagattttggagggaacttagaaagagcttcaacctcttagaaaatttcatttgagtctatatatctcttatcccattcatgtctatatatctctacgatccaatcaaacgactattcctgtgtttttgtatactttgttttgcatttgtattcctataaattctatgtttttcttattcttccctttttttttcatttcctgcgattcaaaggggcataataggtccgtttcacttatgcatgagcagccactttgcgagagaatttggtggaagacatgatttgctttctacaactcccattgtttcaaaatataagtatttctatgattcaaaatttataccacagtataagtattttttggtgcactaattctaatacatggcatatatttttagctaattaggtgcttgaaagaaatatcaagcaatttaaaatttgatcactaaaataactaaaaggaaatattttcccttaaccctagcatatacttcctccgttttttaatagatgacagttggttttcagagataccttatttggctattcgttttatttaaagtttttatacaaacgcataagataatcatgcttaaaatactttcagtaataaaacaactcacaagaaaaataaaatataattacgtaattttttttaataatacggatggtcaaacatgtttctaaaagttaacggccttatctattaagaagtggaggtagtactaaataatctacaacgcttaattatttttggactggagagagataacaaccaaaggtttagcagctgcatgcactacaatataggagttcttttttatgcgtgggagtcttttatgattatagccggtcacaaaaatagtcgtttcagaatatgtgtgcagctaacaagctaacaaaagaatatgtgcttcttggttattttacctcgggctggttgatttgaattggcacgtatgtacatgtggtcaaaagtgacaaataaaactattgattcctcgattcattcatatacaaacaattagtagtgattaaagttacatgttatcttattaagtatacatatgaaaagtcgaaataaacaacatccttaattttgtaattggagcgagcatcaaaagagctagctagaggacagactgaggctaaagggcatgtaggctagtggttatagtgacctgagtagtactctaaggtcctgagttcaaatctcctatagagcgaattttagattgggttgtttgcggggctgagttccctatttcaatggccgtatatatccggttggacgtagaggccgggtaaaaagtacccttctctaaaaaaaaaaagctagaggacagacggtgaagcacacatcatatacgtacaatcactagaccgcacatcactaggcgtaagcaaaaggcgcctacgcacatcctacgctactgcgctctccatccgggcgcgacgcgacgcgcgcgacagctgcatacgccgccgcatgctagctcgcggcgtcggcgtcggcaccgcgcgcgctcgctcgcgagcgcccggccccccggagttccggaccccggccggccgcgcgcgtcgcatgcatacacgcgtgtgaattcctcgcgtgtctaccatgcacgccacgacgtcgatcgatcgatccgtcgtcacgcgtccgtccatcgatctccagctctcgaccggtcggtctctcgcgcggctgtcactgtgccatgaaaggtagctccgagctaacagctagctagccacggctcaactgacgacgacgatgacgatcagcagccggccggtgtgcgcgcgtggttaatccccaagaggaaggaattggagaggatttatttcacacctattatggtgcacgtaccttacaattccggtgtaatctgggcgaatcttatttgttcaggttaaggtataaaatgttaaattaagttttagtttctttccaataagatttgtttggatatcatcggtatttgtcggtttattagaggttcctgtaaaatccgtaaataaccatcataaacggattttatattctgtatcagggttgtgaaccttgtatgtatgtgatatatcgatccgtctcacctatctatctttccatggttctatgtactaccaagacatcgacatcggtaaatagggtcagatcactaactgaaaagtcagctattttggtcgatcattgtagtagcaagaggacgatatgatgacgacgatgtggatcgtcgcggaggcaagcagagagggggggcctcgtgtaggtacgtaggatcgatcgattgatcgatcgaggtagcaagtacatgagtgattagtgatgtgagagggcagagacgacgacatgggaggaagaactgaacactcttctctcctcatcgtcctttctatatactccctccatttctaaatagttgacaccgttgattttttagcacatatttgaccgttcgttttattcaaaaacttgtgtgaaatatgcaaaactatatatgtatatatataagtatatttaacaatgaatcaaatgataggttacttaaatttaatggtgtcaaatatttagaaacggagggagcatatatttgcatcgtccagaatttttttgtttctgaatgtgaaggcatgtaggtttgtcttgtgagttgtgaatagaaatggttacgtttgtcgtgagatgagctgaaggtactacacatgctcgagataagcaacaataatgcttctctaagtcgttatcagcacagtatgtgacattttttttacacagtatgtgacattgtatatgtgtgtgttcaataattggtatttatatctctctaggaaacatcctccactgacttatcagaaaatgaaagttgtctcaaattttgtttatcgtagagttgctcctcaaattttaatgtattaagaggggaaaagcttaaaaaaatagaaaattatatatcaaataccttcactgtactcttacggttcatacctttactccttgtcataaatatttgacaattagcataacatctacttaaactttcaaaactttggctctcaatatgtgactttttaaatacttaatttttttgataatttaaatacttaatttatttgcaaagatatatttagatatttgtgttgaaaaagtattatcataatatcataaaattattataacataaaatttttatctaagtttcaaaagttcgcccctgaatcttatcttaaatattgaatatttatgatcagagagagggagtaagtttttctcaattcagtttggttgagtattttcaatggaaggtgtagataattagatataacatagaagtatatgtgcattttttttgtggccggcataagtgtctacaaacaaggatatatatggtggagaaaatatgtagtgaaaacgtgaaaactacagttgtatctaaaaaataaactttaagatttatttacattgccaaagagaattttactgggtggttaaatctgagagtaacatgtttacccttgataatgtggaaaaatctgagacaatgatatttttcaggtctctactatatatgtgcactacatatattccctgtattttccctgtatggagtgtcggcagctgctaccttccatatgttacctttcatgcatgtaaagctaacgatagactagtcagttcatgatttatgtgcctatattatttggtaggtcatatataccataggttaaaaagttgctcatcataagcaaatgaatcttgatctcctctaccaactatcacaacataatattgtcttcggataaaaagagtgcaaatctatcatttgaatatatatcattaggaaaccataatgctattctaatattccaatatatactttgtgcctaaaattctccgataagattcaaattcttcttacgaactgtcaaatcattgaagggagaagaaaagaatcccattagatcagactgaggtgttctctggacttatgagcttcacaaatctcatagtctgattctgctatagaatatttgcaattagttgctagctacaccctccgtcctaaaataagtgcagttttgcactattcacgttcaacgtttgaccatttgtcttatttgaatttttttattattagtatttttattgctattagatgataaaacataaatagtactttatatgtgactaaatattttcaaattttccgcaaatttttcaaataagacggacggttaaacgttgggcacggatatccacggctgcacttattttagaacggaggtagtagttagtttcaaaagagtatggccatataaatctgcatatgcatgctggtagaagcataaactaaattatatctatcttgttgaaagtgtgaaaagtgtttccaccgaaccctattctttttcgtggaagatgttgtctattcatcaatgtttcttagctgcaaaaaagaaaaatacatgttaatcacaaggacgtacgattcagggccgggaggggatatattactccacgtacatggcctatacattgatataatttcgtagaacatgcattaaaagattgtttaattagccatataaatcaaaattaaattatatccaaattcattgtactaggatgtgtcacatatacagtacaaaattgctatattttgagatggatatagtgaaaaagtattgagaatattgttgcaaataatcggtgataggaatttgtatcggattgctggcatatgcttgcatgtcacgttggtggaaaaaccatctttactctcggttggaaacccccccttaatcccggttttccaaccgggagtaaggatccgggactaaagatggacatcatctttagtctcggttgaaataaccgggactaaagatgtattagtcccggttggtggtaccaaccgagactaaagagacaatagcgggcagcacagctggtcccttttcctttttttcctttttattttctcccgaatcaagtaggcaaatccccaaatcaaactaacatcccaaattcacatcaccaaatccacatcacaaatcataaagttacttatacacacaaattaaatacatcataatatcctaagaaattactcaaatacatcacagatccaaacaatgaatcacaaaattactcaaatacatcacagatccaaacaatgaatcacaaatttataacatctcagtcaaatacatctcagtgaatcatcacaaattaaaaaaaaatgccgccgccgccggtcgccacgaccgccaggagcggccccgtcggccgccggcccgtcgcccgccacggccgccgctgctcgccgctgcgcgcggcaccaccggccgccgccggccggcccgccggatgggaaggggaggaggaaggggtggagttggagaagaggggatgaggaagagagttagagaggatggatctgaggagaggggtgagattcgatccgtaactgtggatgagaggataagtgatagggattatatactacgtgtttaattttagtcccggttcgtattaccaaccgggactaaagtggtgatctttagtcccggttattaacaccaaccgggactaaagatcctcgcccccctgacatacatctaacaagggatgaaccgggactaaagatcaaaatttttataaccgggactaaagatcaaaatttttataaccgggactaaaaacaatctttagtcccggttctttttggatccgggactattgtgtattttgccggactgaccaaagatggtttctccaccggtgtcagctacatatgacaatatgtccaatgttgtattcatatagttcatttacacatacccaaaagagagaatattatccccatgattaggatgctccgttgcctgacgtacatgtggaatcagtctgaagtggggttagaatttagagtctggttcagctaatgattattagttttttttggtggaactcactttttggaaaattctcaacactttcagttatgcatgtatatatcttttctggttatgaattacctgaagttattcgtttcccttggcattgtaggaaggataacaactaatgcgcgctgcattcatatttgcgtgaacttcgcttttataaatacaatttaggtgcaccaacctttcacaaataattttttttcctgaaaattttcataactacatgctatgcgtgagagtgcaattaggtgtaaaatgtttgtgatgtgttctgttttacttgtttggcgtgtatcagtgtgtttagggtgaagaccttcttcctgattttgtaatttctttctccttcttaatggaatgatatacagctcgatctcctgtgttgttaaacgaaggcgtaaaagcatacacttctatgtttgcgtaggttttatatgcgtctctctctactgtctctaaaaaaattcatcacgatgggattgtttggtggttttgggcacaattcgatctgcagctcttgacttcctactactaaaaactgccctggacttccttcaaaaagttttggtaaatctcgaaggtttagttaggtactaacactttgttgatttccgcacttctaatgctaagacgtcacatcaacacattacatatattgatcttctgcttgaatcacccacttctgattgaattaattacttaccgaggagaagacctgactgaaaatcgttgtcgagatatatacatgtagtgtcttaagtcaaagacgttagacgatcaagtccggttcgtgggaaattaacggttaatttgcatggtttgacatctgaattcgtctgtgttggagacggtcgtcacgtatgatgcaagtatgacaacttaacgcatactcattacactttaatatcgattttttgggggatttgactgcacaatttagcatattaatttataatcatggttgaaactttgtatgtaggtaacacgattctctgcccctgatgcaagctaaacgaaccactactagttagtccaaacgtcacgtcatttaggctaacatcaggccagggtcaggtcaaacatttttctagattttaattcatgcggattgacatcattgtttatgagcgttctttgtttttttttccccttgaaataattaaggattagttttgtgtgcttggatgcaagtgtaacgactcgaccaggagattagttttaatttgccgtctgcatgcatgttgacacggttttggtttaattaagctgaatctcggagtaaattaaacagctatatatgttttcttttttctttctttctttcgttcttttttttcttgaaaggaacagctatatgttttctattgcatttcttatgcgacatggcattattggcatttttatggcataaacgatgagacaacaagattcatttctttattttctttttgagatatccatttatgtagctttaagatgtcaatttattttgggcctacgatacctcacacgtccggacgtgccaagatttttttcctttatgttcttttttaagatatcctataagatttttaatcatagtaaatccaggagtaaaagttttattcttgtattcatgatgacatacacaaatattagatatctatttttaaatctaacgatagttttcatatttctatttttgcactacatattttttttctagatctttacattgacttaaagcaccacgcaaaaatcatgagatcgagcctcaaactgtggatgtatattcaattgagtccccaggcaagcttctcatgagaaagtttgcagaccatatgcattgaaaattgaaagatttgttgacagaaaattgttgatatatgcgtgccgccaattttgatcaatctttagcgtgacaagacgaagcaaagtttgaaaatcatcacgtaagcaaatttgtaagaagcttggcagacactgccgggtctatattttttctgttcacatgttaaccttaagcttcaattaattaaacatttgcaaaaccagattagccgtcatgaatgaccagagaaaaaaaatcgtcatctaagcaaatcaaatcattctgtgtacacgtaattaaggcgttacaatgcaagggacaagaaactacactatctttttttgactgatcatataataattaaagtactccatggagaaagaataatcatcaatattatttgaaactaatataaggtcttaattatccattcctgatccacacaattgccgggctttggacgtcgtacctacctgagtcacaaactcacaacaaaccgatcaaaaagtcatctaaactcaattgcaaacataaattagttgggccttaaatttttggagaaactttttgtatttatttgggtggcgactacgcgcttcttgttgaatgcgtggagcccagtgttgaattagcaagaagaactcacaattaattaaagtaattaactaaactagtcgagactcgagaacattggtcatgggagtagctcaagagagatcatctttttggacttctctgccgttagctcgacaacaagatgacaaattaattatgctcttctttttattagtggaagatgccacacaaatactactaattaatatagttagtgtaatgattaatataagaatgtaaagtgctcacttaaaagaggctcgtgaagcttcggccgcgtgaaagaactgatcagattgaataatttatggctcgtgcatgcatgcagtgcctatatagctcgcaatttttgattgaattcatgatttttaaatttgttttggcttttggagggaagcgaatgatttgctggtgtggggattagtggcagagattgagggggactaattttggatggatcttggattaattaggtttggtttaattttgtttcagtttgcaacgcatgtaactgccgatgggcccacgcgtagcccacggaccggaccagttgtagccgcggccatccgctgcgggcgcggtcgctgtccgtgtcggctcgccgcccatttgatttgcaacaccatatcaccggccggcccagcatgcgtgcttctggtgtactagtattctggtgtgtgtgtgtgaagcgtaaatttctatccctcattatcatgcattttacttgtacatgtgaggggtagaaacatcatatcacgtgagtgattggatcaataacgatttaaggcggacggaaaacgatcgagaattgatgaaagtgttaaaaaatgggaacagggtaaattttggttgctattaaaaaaacgattttgctatatctcactcgaaagattttttcttatctctcactcgattttctcacttaaatttacagtgcattttcttgtaagttacagtgtaatttatgaaacttacactgtaacttttgtaagttacactgtaatttttgaatcttcacatgtaaattttaaattttgtattggatttggtctttttcttgaggatatggtaatttaatgttcattatggtgtttcttaattgctttttgctttttattatatctatcaaattttaatataaagattaaaaatctgtgtgatacgattataaaaatctttcgaaagatgtataggtactccattaaaaaaaagtgaaccggtatggtagaaggtagtcacgacgctgaagtcggcggcctgaactgggtcgcagcccattatgccatcctgccgcggccggaaccgtggatggcacattgggccggaacgttgtcatagccgacgttcggatccattcgatcagagaataagactattttgcatccctctttcaatcgcagaacctggtaaaactcgtcccccatctcctaaaaccgttacaaatcaactccccgggtgatttcggaggcggttttattccacatgacatttttaaccctgttgactggctaagtcagcttgtgagacccacgtgtaagtgacatgaataaaaatgaaaaatggagggcccgctgtcagccacgtcagtttcttaccaccgtctcccttcctcctccgcttctctcaccaaatcggacaaaccaaaacacactcctctcctccccttcaatccttgatagcatcaaaggcgccgggggagttctgcatgtacagctgtcgttgcatgacgatgagggccttctcgacgagatgaatcgctaggctccatcacttgatcacaacctctgccgttcgccatgagaatagtagaaaaagagagaccagactggtagttcgactagaaaaaaccagaaccaaaggtaagcatgattcggttaccttcaaagactgatatgcatttgaacagctctgacccggctgaactggtcggttttgcagcgaaccggacattaaacaggcactggttgaaccgggcagccatacaaatgggccataaatgggctgtctaaaggcctatttgttaacagctagtgtagctggtggtatttttttttttgcaaaaatagcaagaaatggtgcatcaagtgggaatcgaacacagttccacgcgttggaggagccatgtcctagacatcagaccatccaaaagcatgtgggcatatattgtatacatgtagactatgaaccacggttcaactgcccgacccaccgattggaccggcggaccgctgaatcgagaggtcggccgggtcattgttaacgaccaaatttggtaatccaaggatcggagataaagaaaaaatcgatatggagttcgagatggaaatcgtcccggaaacagagtgaggatcggctgaagtccgaatcggctgcgactaggatcagcagagatcgagtgggacagggttagccgattgagctgaatctgacaatatgacacggcatacgttgtcaggttaggttgacgtgcttcatgatgattgccacgcatggatagagtcctgagaaggcaattgtatctattaattaggatattttatgtaaattacttagagatatgtttgggcaaaagtctgctgctaagacttatggtatcttagagtttgttagagataagagttgtgtccgatatggacatgttttgtaatcctctggtataaatagaccccgagccccatgtactaaaataacacacgttcaatacaatctcggcacatcgccacccttttttactttcgttttatttcgacaagttcttgctttttggttgagctgtatcggtttcgatcttcaacaagaggtaaaacttgttatggcggcttgcgttctcgggattagggcttccatctttatgatactctaatcttgtttatgtaattcgtcgagttatcatatatcttacataatctctagcaatatcattatctaacctacaattggctaacatctgctaatagaaggcagccgattaggttaaataccgatgttgacctagattatataggatatctaccactctatgaaacatccaacgacttgattgtctagatattgcatttcttttcatacttatagttgcatcagttgagtttgatcttatgagtcgtgattagaatctcaatctctagcctgtctttgtttgccgattagggtagtatcagggtttcagccgatcttatctgatttaactatatttatcttatatgctttattgacatgttaaaatctgccctttatgttaagatcttgttgcgttaaaagtatattaggctttctgtttgatatattctacttgcattaatatcttaatatagagtggtatcggagtattagccgatacatgctagatctatctgatcggctatgctatgaacatagatagtcttgttgttagtatatatttcgatctaagtgatttatactgtcttggcagggcgaccgatttatcccaatcactcgatttaagtatatatcgacataaggattatatattgttaatatctacagccgattgagtagatttagttctttcttatttattcatgactgctgatcgatgcatatatgacatcggctcaaagataaatgatatgtcatcggcatctagccgatcagctatcgtttatggatttaaccgtggtttctttgtctttgtttcttgttgattgcaggatcaaatcaactggcacgctcacacacccaaaagcaagttttggacctgcactggagttaagcagatctcccaggcctcgtgtttttacatcaacatcaatagtcatccaccgatccggcttttttttactatatggccatgagcactccacctgaaaaattgacaggaactgctccacgatcacagcaaattgccatgggaactcgacaggcttcttgacggaggcactcgacgcgcgccccacggtgcttgcgggctgcttctgcctccagtgctggggaaggcaaggcatagggtgttggcggagagaccaactatgaacttgtcgacgacgaggcacagctcctgggaggaggtgctctagaccctgtggcacaggaactcatccatcatgcgcgacatggcgacgcggagggcactgttgaggcggctgcttcgtactcctgctcgcaccagccgccaccggtgtcttccgctgcggcaccgtggaatccgttcggccccggtggcgatacagacgacgcgggacaggatgggatcaaggagattgtgtcgggtggtgttggtgttggcaccaacggcagcttcgtgtttggtggtgccgctcccgctacgagtcagcaagctcccgtggagtaggcagtggagcggagcatgacgttgaggggtaggtgagcgggagtggggcacgagctcaacggctggcggcggggtggggcggcaactggcgagctggtcagtcggaggagcgagagagtggctagagatgaagagaagtgtggctgacgatgggccccaccatttttcatttttatctttatcactgatatgtgggtcccacaagataactcagtcagtcaatagggtcaaagatgccacgtgggataaaaccgcctccaaaatcacctagggagttgatttgcaacagttttagaagttggagacgggttatacccggtttttgtggttgagggaagaaaatttgtggtttttgagggatgcggttcatctaaggacatgagttgagggaagaaaattagacttattcctttgatcagttggcccattcatgagtagttgggacataaggtaaaagaatccaatttgactccctcaaatactataggaaggataaactccctcaaatattatataggaaggatctaattcgtctccttaaccgtaaaaacaggtataacgactactccaactaaaagaatcgatacaactactccaactaaaaaaccaatacaacttgactcccgatatagtattcatggtgatttttgttgacgtcgtctacgttcgtgtccccctcctttcattgggctcaaaacccacctctcaccccagttaaagcgtggtcgaaggacggtcaaatcgcttccacatcagtcaaacctaggtgctaacttcccccacgtccacctatttgatgtcctcgtctcatacgaacggtgcagtaacaaatatagttatggcggatctagttttgtagagctcttttttaaaagcattatggtgaaaacggttcaaaaatataatatgtggtgtaagagatatcattgtttaaagatgagaattcaaaagatatcacttgcacttacctttactagttcaaggtgggtggtaggtcatgtacttgtgttcggttgttaccacattttattgcagtaacattattaagaaattgcagtaacaagcaatgttactgtaaaaattacagttgttactgcacacatacagtaacgttatgatgaaatggtagtaactcacgatgaaaagtagtaacgataatggtttagtattacaacttatggagagataatttttcaaagaccaattttcaagaagaaacggtagtaacacactcggttattgtaaaaacacagaaattgttactactttacaggacacacaaagttacatagttgtaggaagctaactacatgtgtaattatctttttttctcttttatagaaaactaaaaaataaattggtaaattcaagacttgaatcccataatctcatagttcatagcaagcttttctaaccaatgcatctaatgatattatttgttttatggattattacctgtttcttttgtatctcactttgtgagaaagaaatatggtgaccgaatctaatctctttcactcccaaagtagaataaaaatagatatgttattacaaaactaataacaagttactatgtttcagtagtaacattatcgtataagtacagtaacatgttacgttactgcaaaacatataggatgttactgcacttttgatagtaacatcgtggtgaaattgtagtaaactagtaaccgaaacaaaaaataatgaattaaaagtctacatgctaatcatatatttgttactgcacaaaagtatttgtgttactgcatagcagatacacgttaccacaagtttatgtagtaacattgttcaagaattgcagtaagacgttttgttattgcaaaacttataatatttaccacactttcgtagtaacgtcatgatgagattgtagtaacgtacaatagatattaataacacttatgatataatattactacttgtagagagttaaattttaaaagaccaatctttgaaggttctctatacccttgccccatgagtaaatcgagccaattcccctctctctccatattattatacatttttttcttactatacatattcttgcagtaacgttatcaagtaatcgcaataacacactatgttactatgaaacttataattagtttcataattgttactacatccgtaacgatatgatgtgattgcagtaacacataacagccaacagtaatacttgatatagtattactgctcatggagagtcaaattttttttaaaaaaaccaatctttaaagagtaatatctctcacatcatgtactacttttaaaaaccgtttgcaccatgatgttagaaaaaagtgcttatcaaaagtagatccatcatgactatattatgagtacatctcaatattgttactgcaagtaagacatagtattactgcacgatgaacatcacgatactacgtcgtttggaaacgagaactgagaagagtagatgtggtggggaaagtcatgggtgggtttgaccgatgtgggggatctttgaccaaggtgtgtgtgtgtgggggggggagggtgggttttgtcctcttggggagaggggaggtggcttggaggaaggggtatagaataactattctatattattctataccacgggtgtagaatagtttttctatatctctactattataaaaatttcagatgtttttgccggaactttggtacgtcatccgtgtatgagtcgttttttaagttcattcgcttttgaaaatatagaaggagtcgtatagaaatctcttaaaagaactcgcatgataacttgagacgatcggatttataattgcagctcatgattttctaaataaaatatatccaagtgaattcttagagtgaatttcacctgaactaaaccttacaataataataagattataatagtttttcaatcggataccaagttttctccaaccataccaatttcacgatcagtttttatttgatttcagatgcatcaacaaaggcaggggccgcggcaacggtagttgccggctgctatgaccagatcgatctcgtcacaatgtgctgcgactagagcaatgtgctgaatgcatggtggcgtgctctgtatatactgcatttatatggagcggtaaatactgagtttttctttggaggggtatgtactgatcactttgttagacaatagtatagagtgcattttccataaatatgctgaacttttcaatagaggggtatatgctgatttttctttttacataagtatatactcaactttgtggaggtgactagggatcggtcgcccgattaaaatcttcaaaaatcgggcgctgacgtcagcgcccgatttacgtgcaaaactactttaaactaatttttcttttaaattaattatccaaatcatgatccgattgcaccattaaattcgttgcaattaaatcttcaaaacaagaccacacatgcatatattctgacgaaatttttttagcttattattgaattatttttaaatgttagacgatgttctaccaggtatatcggaattgtttcactaagtagatcaaaaatgtttcactcgtttaaatcgtgtattgtttcaccttatataaaaacaatgtttcagcaaatagcgaaagaatgtttcagttcactgcaacattagatctatacatagtgaaacattgtgagtacactaagtgaaatatttttcggtaaaacaaaaaataaaccagattcccttaatagggggtttccaaaatatgtgggttttttattgcaatggaatgttttattcactgcaacactagatctaaacatagtgaaacattgtgagtatactaggtggaatattaaataaaccaaattcccttaatagagagttttcaaaatatgtaggttttttgttaaaaaaagtattttaattcactgcaacattagatctataataatgaaacattgtaagtatactaggtgaaatatcttttatagaaaaaggggagagagaagtgggtgggcgcaataggtacggacgtgggggaggggcgcgctgggggagcacccgatccggctcccccgcgccgggcgaccggctctgagcattttcgagactttgtatgtactgcatttttctatggagtgctatgctgaatttttctatggtcgggtatatactgaactttgttacacaaaagtatatactgcattttccatagatatgctagattttttcaatggagtgtcacatactggcttttttacaccgaaagagtagtaacatactgaaaaaaaaagaatcgtatgtatcccccctcccaaaaaaaaaagaacagtatatactcattcaacaaaaaaattcagtataactacaaatttagaaaattggtatatactataaatctagaacaactggtttctcctagtactatagaaataacggtataaatttattactagtctctgtctctgctttttatctcgtattacatgtattgatgcgtcaaatattttcttactgatgttgatctaatattttaatattttcttgtagaacggtcaccattaatttggagtgaggaaattcaaacaaattactctgcgtatctgaagctgcaaaagaccaaaagcagagagctacaaactgcaatttttgtaaggaaagaaaagccatatatacttgaccacacaaataaaatcttcaatgagaaacgtagtatatactgaccaaaggagcagttatatactcatttaacgagaaatgtagtacatattgaccaaacaaagagatcttcaatgaggaatataatgcaatatatactgactctttacatactggaaaaaaagatagaacagtatatagtcaaacaaaaaaaattagtatatactactaatttagaaaagtagtatataccggttcctagaaaaagtatatacctaatctaaaataaaacagtactagtaatatgcacgtgctaaacgctacggtataattttattgagataactatgccagtgacaaagcatgaattctacgatataccattgacaaagctcagttctataatataccatcgaacaactagttttcttctttacatgccatcgctgctagtcaacagttagtcatattccgttaagagtaaaaaaatgtctattttacccctagggtatcatgcatcctcattgatttcactagtcatgatccactatttcttctcattgatgaaaaatagaaatcacttgtctttttatcatacaagattatttagtgcgacatggcattgtgtaaaatctcaattttatcctaggggtataatggttattttttctcgtagaaaatgagttatttgatggtatatcgtagaactgagttttgtcggtggcatattatagaacatgcgctttgtcgatggcataaaatggattgactcaattttatttgtctttagtttctctcctaccttgcacctcgttagaaggtgtattttcagttgttgtacttgtgtgtgcaaacaagaaaagaaaacttatagttcgtataggtcacatgtgtataaaaaatatcacaaagtacaaaatagtagacatgttacaacacctgaaaaaacattagttaccatcgcgaaagcacaatgcaacccattaacttatgacaatacatgccaaagcaaagccatttcaacgccacctttgaatgtgtacaaaagttatgcattatacataattggtttatcttgtcaatcaactggcatgttttgtacaaccaacacttcaattctaaccaagctattttgttgagcagcaatattacttgccgtggagcaatgaagatacactaaaggaatcaaagtggctaacctgaaaaggataatcaaagtgcatgtagtctagtggttgcagtgacctgagtaataccccaaggttctgagttcagatctccataggagcgaatttcagattgggttgtttgcggggctaaattccctatttcaatggccgtatatatccaattggatgtagaggccgggtaaaaaatacccttctcaaaaaaaaaagtctttccaatcttatttgcaagagggattaatccaaattacataacttgtccaaactgaaatgtcaaaaggatcccttaagaaacacattttgcttgatcacttatttgtatgaacacaaagaacatagtgtggttaggaagagaagctaggcacaataagtaagaaattattctaaatccaaactaagtataacatattcccgcggtacaaattgatatttttcagtacatataatctcgtgtaaattggtaatttgactataagtctataatctcacaggaaccccattacaaaaaaattgaaaattgacaacctgcagtaaaaaaaattaagcgaataaaattggttataccttcaatgcagggaaggaggttatgtattttcactgatctggtaacggaggatcacagatatatgtcaatatattcatttatatacctacccggaataatccatcaatagtatatacaagaatgactgcaatgatgtcctcctctgatcttcgtgtcattagcagaatagtgtcaatagaacaatcaataatggtcaccaaagaaaatattctaaaaaacttaaaaaggctctctgattggtctaaaaatgtacctacaacttatgtgatgggtgttttgaagttaccagttagatttcgtagagattatatgcagttaatcagaaagttttggtggagggaggagctgaatcagaggaaggtccattggatatattggcatgatttaatttcaactgatatgcatggcataagttgaaatgaataataataataatgccatatagattccaataaacactgatgttattgtgtaacaaaaatatactgcatataagttaagagagtgattcctacaaacgagcagcttggaataggctgctcatacaatggaagatgattcttaggaacaaaaactctgaaactgtacacaaacaggaccaaaacaattgaaattatctgcacaaagaggagatataattcaaacctgactggtcaaagttttcaaccagaggagtttgtatgcatcgatatgctagatgatcaaagagatattttttcgaagatcctcactaactggttcatgtctcaaccccaaccttactataacccatcatgagccactggttcaaatgtgctttcaatgggctcctatatttcctgaaacagccatccactgtttttcctttttgatagcagtcaatgacaagttcaatggaataaagcgagaaccattaggagtaaattgttttattaccatcatgttgtttacactgagtaagggaagacccaattcctcttgatctcttttcactgggaaaaaaaatccatcaagcagctactcgtaatgagaaagggctcccaaccagggatgtacagaacatgaatagaaatcaggttcatgtaggattttcttttaatcattagaagaaaacattgtagaattctcaaaagaacataaataaaagctcactggtacagataacaagagctagtgtccgtccgtcagtcccgatctctttctctctagtgagctgagctccacttttcacaacttctgcatattggagtagtagacagtgaaaccaaaaatcaaggattgatcattttgcgtgaatgaatacccagattgttttcttaaaaaaagagaaaacatggacttattattgaggacactaccactggaagtctcagctagtgatactttatttgttaaggtcatgactaactcaacccaagagcaggtatatgcagttgggcagtgttgtgctgacactgatattagtatctacaagaggtgtgtcaccaagtcattacatgacatgcaacaagtatgtgcttcaaagatggatgctatgacattttacaacttatgaagcctccgaatttctgatgatcttatgttcaatattacacatggcatgactactataggtatacataatgaccctcctttatgtcggtcaaaacaatttgtttagaatggtgattatgttatttgttgatactctggcaagatagtcagcgtacttattacaaagatttgttacaggacaagaaaatatcataggaaatggatataactttatcatgtatggcttcgcacaatgctcacttgagttaaatcgttcagagtgtcaaacttgtttgggatttataccctctactctacattttaataggtaaacatgtgagagaagagcaacaatatggtgcaatttgtgatgtcacgatatcctttcttcacataccttccaacgttgaaccaactcacttatcaggctacacttaaaggtaagagatgcaaaactgatccgtgtttgaaaatttatttatgcatgatggtctattgctatacattgattataatattgtcagtttatagttcaaaactagcttttaggggtctaattcccactcggtgtaaaattgaaagggggccaaagcccccactcgctgataattttttttggaaaattttcaattaagcaataaaaatacagtaggttctctggatctcccattatatttgagagatgaagtgaataattcaaatcatcaaacaaacataatgaaatatccgatgcctcgagagaaaaatattggagacattgctgggcctttagcctgccagtcaacttcagtcttatatgtacccgtcaaaccactcgaaggtggcgaccagatgtgttacacattcaagagacctgacaaaatggctaaagatctacaacatctcaaatattcttaactcatactcatgtgaatctagttcccaggatttgcactcacactttcatctcaagcatagttattcatagcaaatacatctaaagcaaataaaattaagattacaactacttaatagttacatgggtcgactagccaaatatagacatttcagagaacaacggaagcttgtctacccaaacacaagcacacggactagcggtttacccccattaagttcaaatcctagaagaagcagtcaaaaccccgcatcactcaaattaaacaaagtctattcctacaaaacataaattagacaaaacatggcaagagtgtactggcaatagcactatcaaacctacatatataaaagctttaagtcaaaggaaggctatttgttgtctcaatttttagcataaagcaaattttagttcacaaacattttggaaaacatatttaggcaagacatcttagcaaaatgtaaagcataataatcatggcatggtcaacataagtagataagcatcattcccttaccacccaaccggaagtaaggtaatcataccacatatataacaatctcattattatctcaaaatatttagtttcaaaagcatctagaaaacacaagattatacccatagcacatcatgtcgctcatgaccgcgagcacagctagtcgataagtttctagaactctgcagagtttgtacagctttacccacatgatatgaacacaagggcggatagagtgaattttgcagcaaatgggggcaaatgcccccttgacacttttttacttctaagtctacctgagcgatagatcattggcccccactcatgctactttctgcctctgcctggcccccactcattctattttcttcgccccagtctacctgagcgatagatcattggcccccactcatactactttctgcctctgcctggcccccactcattctattttcttcgcccctagcagaacttaattaccaggccagcagcagaagtcgatcgacgcaactctcctcaatcgccccctcgctcacaaccgtcctgcagcgcgcggatccttacgcctgatcagatgcgataattaagcggatcgatctgcaccgtaccacgccggcggcactaatgacagaggaaagtgttagatggagaatcagccggttgcgttggatatatagatatactaatgacagaagtgttcgatggagaatcagccggctacgttggatatacagatatattaatgatagaggaaagtgttaaatgtagaatcagccggctggcattggatatacagatatatatgcatctcgctctctcacctgcagatccggccggctagcagtagaggcgaccttcagatctaacagcagagacgaccttcagatctatctggccggctagcagcagaggcgacgagtccttaagaggaagggatccggcgggaaattaattcctccttaaaacaatcaatttgtgtttgcattttatttgtcaatggcaattcagtagtaattgtgtatagcaattcagtaataattgtgtatagatcatacaaacgacgttggaaaaaaaagaaaaaggaaaaaaagaaaaaagaaaaagacgaggaaccgaggaaataaatggccactaatgtaattgagaacactgacgaaataaactagaagaataatcgggcctctacacagccaaagtcaaatagataaaatctaaaatgtatatattctataattggggaagatggcatggtaaaaaggtaaagtgcacataaagaaaagcatttagaagaaaaatcaattatgatcaaccggcatggtaagcatgaagtactatagaagcacatcgtgaaaaggtacaaaaatcaatattttggctgtcagacaggaaaggcataccacaaatttctgctttgaagaactaagcttcaaactatttttatcttaaacacaaacaagtctttaatgcggggagcttgatatgtggtcatttctatcatcagaaagaggttacaacataaaatataagatatcaacgctgtcaattcagaaccacgggagcagattgctgcctgcactgcttgtgtacttgaaagaaccaagtatcagaaatacaaacagtagcttttaggagatggaactaacaaaatgtgcatcctgaactgaaagctttatgtcacaagaaaccttgcagatcaactaaaaaaaaataaaaggggagctaaagcagtctcatttcttaagtgcattcatcctgtcccgcaggtaatacaactttgctctcctgactttcttcctgtccaagaccttgatttccttgatgtttggagagtaactgagcacaagagaaaagttgcatcaagaaagacaaaagacaaaacaaaatgaatcaggtgtaatgatatctttcatatttgatttcagcaacttatgataattttgtatgaaaaattcagatgaactacaaaacaaggaagaaatattgagtaaatacatgaaaacatcctattgcattacttccattctacaaatatacccacagcaccgcaggggttaaggaatatatgtttgcaggggtgaaaattgcagtttcgtgagagacatgcatatttatgaaactacaagctccatgtgcaatggagctcaaacaacacaggaatttattgcacatctgtactataggtatcaaatctccacattcactttcttaggattttgttaaccaggtatttatcaatatatatatatgattaagaaagttatacatggttttacagaatgcaaacaatgaaggtagtgtcagcatgccactgttatcatcagcctatcagggatatgaggaagccaaaggatacccaagaaacagacaccaactttaaatgagcatttccaaaatttgcaaggaactaactacacttctaatgcaaaataacatgcatatagttctatgtgcacttgtggccatatggaactgaatgtttgtttatgcacaatcaaagaaaaatgatcctgtctgccaagcaaaagactagtggagaatagcctgctcaaacctttaagtattaagcatgatgcaaggctctcaaatttgaatgagcaatcagtctcatgcagtaatagaatagcaaaaaacaataagtgccaatttctatatgcactttaaaaaaaagaatgaagaaagggaagcgaatattcgctcacttacagtggaaagacagactcgactccaacaccagctactaatctacgcagtctgaaagttgtattgatcccagcattacgtcttcctatgacaatgcctttcaacgtagactcacgacgcttgttctcaggaacttgctgttgacacacataatcagaacaacagacatgacggagcaggcaaataccagtagtaaactgaggatgcagatgcttaccaatctcatttggataatacatccaggctgcacatcaggaatctctctttccccacggaccttgtcaacagcctccttgttcaagatctgtaacgcaaaataacaaatatatcgagccgcttgaggcgctgattttaacaatactgttaaaatgaatgtcatatgattcctttgcataatactaggcttacattcataatgtgcctggccgtcttgtcaggcctcttaaacttgatgcgcggaggatgctcgactcctggagagtcagaactttcctcctcgacagaaacctcagcactccccactgttgatagacccctcattggcatggtattcacgcagaacccatgggaatgaacactatcaccggagacgattgagttctgcgcatcaagaaatcgaagcgacaggcatgaccaaaattagcaggatcaccgacagcaaaagggaaacagacccaactcatagcatatcccagatgcaaaaacacgcaccccaaatggacgaatccagctgcaagaactcaggtgcttgatggacagcaggttagcacccgactgcgcgactccagaagctgcacggtccaagagcttcgccgcggagccatggcttccggcaagatagacgcgccgcagcagagactgcatcgtgtatcctctactactactactaccctgcacagataaacctacgcgtgagccgagataagtaaaagaaaaatccccaaaaaaaaaactggttatttctactgcatcacgcatcgaagaaatcggcgacaaatccgacgatctaatccataggggaataattatcatggtttgcgaattaaaaaaaaaaagagacagcccagaagttctaaaacctcacaaaaattcagacccagtgaagagctcgtggtcattccgtggggcggaggaggatgaggagggaggctaggagaggaagaataccttcgattcgaggcgagatggagcccggtggtgggaaggaggcgcgcgctccggccgccgccgccgccgccgtcgcgtgggaggggaggggaggggatggaaggaggcggaagggagaagggaagaaccgaagaaatttgataatctggtacattggttgatgggctggagaaagcccaacaaatctcgctgccgttggaaaaagtccactttagatcccaaattatatatggtcgagttcttttcatgtccgtaaaccataaaatcaggtatagtagggagcccgcgaattgcaacggctaaaaaataaaataacaataaccattaattcatcgttcaattttcatgatttaaaaaagcatttattcacttagagaaaaaaaagataggatttcaccaccagaagaaatttatttattctttggctttaaagagtgaagataaaaccaataaaatttctattaaactgagagaaatgctaccctttgtgttatggaccatgcaagcttctatgtagacgagaatgttaacataagcttctatgtaaactgagaaaaatgctgtcgcataatttgcatacaaatagaatttccatcgagaaatctttgctacaacttcacttctaatgaacatgctaatctctctccatgtctccagctagtgccataagctcccactcccacacccccacataatccatcaactcttttttcctggcaagtggctagtaaaccaaggccacacgctagagtgatctagggcctgcccaaatgaaatgacatgaaaagccacatgaagaactttgggagcacgatagttcttcattaatatctgctttaggccttgttcggttgggccgttcccggccgggatcggggcccaatccccgtggatcacctcggcaaggaaaaaatcccggcccatgtgaaattgtgcattcggttaagccctgacgtggattttagcctggcccaccacggggtttccctcttctctaggcccgggaaaaaatcatctactcctggggcgtggaaaatttcctcggcggcgcaacgaagacgcgacggagggggcggcgcgcggcgcgacctggaggcgatggcgacagcgacgggaaggctctctcctccggccgccaccttctctccggtgagcacgctgcctttccccttctcccctcctcttgcaaagctagggttagggtttttttctcttctccctttcccgtcgtcaccgccatctctcttctcgccgtgcggctttctggtgagtgagcactcagtgattcgtcgtcctcctcctcgtatcctgctcgatctggtgagttcttgatttgggcgtggagctttttttcttggttgggtggggatgagttcttgatttgccgccgccgccacaccgcacaactcttgttcttgatttgagttcttgattcacggtggctttgaggcagcagatggcgagagcgagagctgtacggtgactatggaaacatgcttgccttgattagttttgcttagtgtggctgatgatgtgatgcttgcctgagcgtgtcttgtaaaattgactacaagtttttatggatgtttcggtaggtgatgaacctgatgaaagaatgttttttgaggtaccgtgtggctctagctatgtgcttcattattactgtgttgtcaaggctgaattgtgcttccacacattctaattttcagagagagaaactagaagaaggttgaggtggtcatccttttctacattcaccatatatctgtctatccactatatatgatttctgcatcctctcttaaaattcaggcaactcaaaattcacatatgttatagctcaatcttatatttgtccagagaatcttctcacattacaaatgcagtgattgcttgattaatctacttatgatgcgctgtttctgactctgaaactgcttgctcttcttttatctccattgcttgttgtgaaactgcagcacacttgtatagctgcacctacaaagtagtgcttgttccagaaaaacaaaagacaattcaccgcttttttgttagcttcctagtttctgaactgttagcattccatgtagtgcatcagccttagtttggatataagtgtggctctttgctttacttgtttgctcttatgtaatatgtactctgcatcagttcaatttgatatttggttgacaggaaagaacatatatggtgtatttctttttggaattgatccaatgttgctctatttttttttcagagatgggaacactgcagctggtgactgaagctcatggtggcattagcgctaagcttaaacacttgcattcaatttgtagtttagctcctagctggctacttctatttattctaaaaaaacaactgaactgtaaccattttgattactttgtgacactttcatgtatgcatttgtgaacgtacagcatgcatgtgtgttttccctgtacttaaacaatgttttttttaccggatttgatctgagagaatgcatattgtttcattgcttgcttggaaacgtacaacagctgctttatttttccctgtgctaaacgaaggcagggtttctatgacagggattagaaacgggcaggaattcaaaccccacatggtttgagtgagatgggagggattcactcaatccctccctggataggatcccttggggattaattcccaagcaaccgaacaaggccttactggtcaagttgatcactcaacacatctataaagactgaaattataatacctttgatcttttgacatcaatttactggtcagaacacagcacacctataacaccaagagaaccaaaatttgttaccttaaagcaattattggaacatttaaataaaaaggaatgtattgtgcagtcctatgttttgataaacacatgaaattgaaaattttgcagtttgatagtttggagctaaaacttgagattgtgcaggcctgcgttctgagatgaattaagctagtaatgtgtgatgggaaataaacagtgtgttcattaaaaaataataataaacggtgtgttgttttttatagcatattattcgttttccatggagctaagtaagtaagtttttattttcaaattgtaattcgagagcacgaaatattgtattattattcagtcgaactgattttctaacgcatgcttaaactgcaaaattcaaatatataccaggaaccgacaaaataataataattatatatattctcgatcgaccaatttcttggtcttacatacaaacgaaacaatcaacaactaaatagtagtacgacatcgcggcaatggcgctagctagaccctagccgcgcttcgccgccggccgccgcgcgcgcacgctgacgacggcgacgtcgtcgatcaccggcccgcagagcgagctcatgtcgtcgctcctggtgctgtagaacgagctgaagaacacgacgcgggtgcgcgccgcggcggcgcggaacggcagcacggcgcgcttggcggcgccgccgcggccagccgactcgtgcgccaccctggtggactccctcccggcgtacgcctccaccaccagcgacccctcgcagccgttgctggcgtcgccgacggtgaacgacagcgcgtactgcctcccggggacggtgcggatcacctgcgcgatcgcgctctcccgccccgccagcagctcgacagcgcgccgcccgcgcggcaccgcgaagtggtcgctgtcgatgtacttcaccgccttgagcgactccaccatccaccccggcagcggcgagtgctcgtccaccaccatggacgggatcagcaccccccacctagtccccgggatgatgtacgggccctcctcgaagtccccgttcttcaccaggttctctgcgacacccggacgaacaccttgtcagcaaaccaaaccacgacgaggcacacgttcatggcgcggcgaaagagacgtactgttggtgcggcgaggagggttgagggtgcggatggcgacggagtcgatgagggggccgcaggcggggtcctcggtgacgccggggttgtggatgacgacgtcgaacgcgtcggcggcggcatcccaggcccaggcgtacgagtcccagccgttgctgctgtacatggtctgcatggggagcaccgcccactgccccgacgccgacacgttcagccgctccgcctgcgcgcacgtccgcgccgcgctgaacgtgagcgcgtaccgcgcgccgcgcgccgcgccggcgagccgctgccggatcgacgcctcgttcccgagccgcaccgcgtggctcccctcggggaccaccagcaccatgtccccctgcttcctccccgacgggatgtactccacgaaccccgacgtccgccacgacgggatcgccgacgcgccgaccacccgcgtcccgcgcagctgcgacggcgccggcccgcgctcgaagttgccgttcgccagcagccctgcacctcgccgccggcgagcgttacacacgcggaaacgaacgcatcaaaccaaaccaaaaggcatgcgcgttaccgtcggtgatggcggcgagcgccgttccgctcgccgccgcgcagagcaccaccattagcagcagcagcgacgccgagccggccgccatggctagcctggccggagatggaggagatgaccggtggaagagagctctgagttcttggaaatggtgacctgacctgaccggacgagtgatgtccggtgcttaaatggatgccgccgtgacgaaaatgcccctcgattggcacagaatttaccattctgccactggagtggcgtttccttggtgtcagatcaagtaacgtgaggtgaggtatttgatgatgcaggggtcaagaacatgagtccatgttcactttctttaactaatctctcatcaaattttatcagcatcttcagggttggcgttatgcaacaacctctgaacttttgtaccattacaggatttgagattaacttgtctcacaatttccagaaaagctctgagatcagtgtcctaggctgttaaattttggacaattttgaatctgtataaggtctgcaatagcttgaacatcagttgtttcgtttggtctatttcatatcctgatctggacagaaagctctggctgtgtttagttccacgtcaaaattgaaagtttaactaaaattgaaagtttgaagaaaaaagttggaagtttatgtatgtaggaaagtttttatgtaatgtaaaagttggaggtttgaagaaaaagttagaaactaaactcggcctcagttaaagtacttgttatcccatccaagatctgtactctttccaagctgtaattcgcatctgattgtttgagcacgttttctgcatcagtgtgctgctgagcttgcatgcacatcatgcagagcagatggagaacttctctgtgatgctctcccatcttttatgggaccaatctaatgacgaaagaacaaggagcatagcattaggggaatcatttacatggggcaattatgagtactccatgtgatgttgccaagaactttgtttcaaggggctctttggccatttccctctctgcctcccaatccaccgactatttcatctatctaattttaccatataggatacagcaatcagaattaccatggatttgattttctctgaattttaccatgcaagaaaacagatttaccatggccggatacatcttgatgtagaggctggattgaattccattattgagaagggaaaaaaaatatcagtattattctagacagatgtcgtgtcagtacagagcatatcttttccgctcaaatcgatcagcctccgttatattttcacactcacagtttaactacaatgtgattttgattagtacacggtgacctggcctcttcgatccattgatctgtttgacacttgtaacaccaagcatgcatcaagaacaagataaagactttcgttcaaaaaaaaaaagaacaagataaagactgcaagacgcaattattcagagtattgcactgtgatcacgagggcacgagtacattaatacttcatgactgacccatcttgttcttctgatatgccttcaaatcaagaactaattaactatcactgtactttaatctttcataatcccctctctctcacagcagcaggtcggcatggacgtactgcagtccatgcatgtgagctcctctggaattatcatgtgcatggagttcatcaaaaggctgggcctctgaatgcatgtgcacttgcaatgttggatttatgttaagaccttatctgcatgtgtacatgtgtctgtgcttcctaggtctttgcatgaccagttcttgacacatacctcatggctccaaggagatgtacctgatgggcagccttggagcctggttaagattggagttttctctctgaatccttggaattcagctaaagtttatgagagtgaatgattttttggcactgttaggacccttctagtggctctcacactacttttttttcgacgcaggagagctgcatgtcatttcatttttttttctccctcctcttacactgctcgtctaatgtttcagtactcttggcaaatttggcattttgatttttttttttggggaatacacaaaaggattgcgcacttttgtattaagcattttgatttttcttttacctgaactctgttttctgttttttctttggttttgtggggcagatcattcattcaattacagtagccttcaaggcatagagtaaaggcagtctgaagagagtaggaggatgcaataactagcagcctgtaaatatccaagaatccacagtggcacagtgtatccaggacaggtattcctgaatcagtgaaactgcaagtttggatcttggtgagcatgatggatgagagagaccaacaagaccatattcaatcactcaagggttgagcaggtatgggggtccatgttggagagtctcatgaaactgtggctctcactccactcctttcttgattcaagtgtttgcttggtttattatggtcacaagaggagtgtgcagtgcatgtgcatgagactgcattgcagaacaagtgaacagccattttgtggttccactgtctgttcaatagtatttctcaccctgtttttcttttatcatgtctccttgggtgtattattactgatgagatgaaattatgagcactgatggacatgccttttggatctcatgagatcaaattcatgacgcttactggagagtatttgtatttttcaaggaatggaatgatgggtgaatgcgccacgttttcccaagcttgtaggctatgcgacttttgcaaaaactttctatatatggatttcttagggaactgttttaaatctattttgcaacttttaaaatatttaattcattcgtttgtagttgtaccccaaataattatcacaaattatttagccattcaaattgtctcataggatatattttcctggttacagacttgtaggttgtaatagtagcaagtagtgattgtgatgaagtcgatattcaagacagttacgggtgcacctgaatattttggaaacactgcacattttgcctacttatgtcagtagcatgtgccggacatgctacagtgctgctactgccatgctttcagggtagtaatcccagactctctgtctagtccggaggataatgaatgtcaagggcattaagatagatacatcaccctttcgctcgacaagactttcaagaatttatagagcattatagctcttaaatccagaatgcgggactgagccagcaaccatgctacctgatgaggccatttgcagttgaggccacgcaatagtgtgccccaagctgccaaatcggcccaacgcagataggccatccactccacagtgcagtgcagtgcagtgtgatctcttttgaatggcctgaacccggtgagttgcgaggaaaacgcacgaggaggagctctgaagaatgggagagaggaaagcaagtgtgcggttttgagggtgaataggggaagaggaggacgtgaggagctgacgatggaagccacaaactcagcacagcactatgatagggtccccacgacgagttgccttgacaaagttggggaacacgaacagtggcggagcaagattttttagcccaggcaaacttcaatagaactaatatttgttatagaaatttcatcatcaatttactcatcagtattaaaatttaatcgagttttcatcaacgagcccgggcggtggcttcgctcctgaacgcggacctttgcagagatacacagctcttcgtagggagccgagtgttgcgaatctccgagctagggcgtcggggcagattgggacagaacacatgcacattagcctgagattgggcacgaggctaaagtacatgtacctccagaagctgcaaagaattgtggtcatattatcctctcatcctcacctcgccataaggtgagattgcagagaaggagaagagggcagtaggcgtagcagagtatgtaatttgcggaagagaatcctctgactttaagtcactggcatgcggacccgctaggtagaggaccgtgacacaagttaaaggtaactaagttcgaggatctcaatccgtaatttgccatacccatgagagcagtatcagctctgccctaatttcttctccattcatctgccatcaatttcacatgccaatcgtccaccgatctaacaaagtagtacttcagataggtaaccgaaggcacacaagaatgtagagcaagatcgtcaaaacacacaagtaccagaccatcccggatgacaatattctccctcccgttgagaactttcgatcccagttaaacagaaaccatgggcaactccaatcttttacaccattcattcgtgatgtcaaaaaagcatctcctgatttgtaaatgagaaatactacccccgtttcatattataagacattctagcatatatgtctagattcattactctctccgtcccataatataaaggattttgagtttttgcttgcactgtttgaccactcgtcttattcaaaaaatttgtgcaaatataaaaaacgaaaagttgtgcttaaagtactttggataataaagtaagtcacaaaaaagtaaataataattctaaatttttttaaataagacgagtggtcaaacagtgtaagtaaaaactcataatcccttgtacttatgggacagagggagtatatgaacataggcaatgctaaaaagtcttataatatgaaaattatcttcatatttggtcaagtcaaccaccacaagcagctaagcagctgcaaaaccgctatagaagttcagaactgtgccaagcacatggatgccaaacttcagaactattgccaagctcactccatgtcctcatgtaccatgaacactccaatcagcacactgctgcttcatctcaacagcaatcatgacacagcaaaaccacccacatggcgaaacagcgggtgaaaaatcaaatgttctgacttgagagatcacaaaacaggcaagcaaacaacccaagtaggcagcgtaggggtacattgcaagaaagcaatgtcatatcgtgtatctagccaattcaataaattaaacttttcaacatcatattatcataggtgcatcttaaaatctgaaagttaaccatggaacaacatattctaaagcacatggaagaagtccacaacatgcagttacatgcttccgctgcttcagcgatgcagtgaaagcttaggctattaagacgtgagcttcacttccagagcttccgtagggacatgttcttttccgtgtctttcttcatcaccttcgccactgccatctcaaagtcctcttgtgttacatgcacccttctctcacgaagagcaaacattccagcttctgtgcagaccgcctgaagatgatgaaagagaaagtgaataaagttgcatgatcacaaggtataggagctatgacgttctatagtgctgtgtatatatgcacattgttttgaaactaaattaaatggaactcttcataagtgcacatgcagtgaaattctgcatagaacattctgctcaattttccagagacactagttaaacattttgatgtcatgacactactggtagcgttagaccagcacaatgtaattcgaacttcggtgttgctgccacaatacatcacaacgttagctcaattaaatccagagtcaatgaaccttgttaatccttggacatcttaatggaaacttgaactacaagagaaaaaaaatggaacgggaaacatgtatagatgcacttaggggtaatagaaaagtctcgtcaggagccttctatgtaagcacaataataatttttcaatgctccctccattcacaattgatcatcatattaggcatgtgcagcgataccaagggacaaataaatcatgtagcaatagcatcgatcaaagtggcaatgtcacagtgttggttcggtagcccgcgcatggcgcatgacaaacggaagtagcggagggatttaaactaatctcgcaataatcactcgtgtgagacaaatacacagtacaatgttttataacagatgaaagtaaagactaaacaaaccttgagctcggctcctgaagccccattcatcttttcagcgatctttttcagatcaataccacgcatcaagttcatttttcttgaatgaatcttcaagatatcaaagcgtgactgaaagcaaaagataagcgcatcatcaacacaagaaatcatggaaaaattaacacaaacaatatacagtaagttatcagcacttacatcctcattaggattaggaaattcaattttcctgtctatgcgaccaggcctcagaagggcctgatccaagatgtctatcctatttgttgccatcagaacctgcatggaacatttaacgtgtcacaataaactccttcacggttattaatcggcacatataacatatgcaaagcagtggcacacctttattttgtttgatgcttcaaaaccatcaagttggttcagaagctcaagcatggttcgctggacttcactgtcaccgttgccagttccagactccatcctagcagatccaatggagtctatttcatccatgaaaataatggatggtgcatgttccctgtaatatgttaaccaaacaattaagcctacactgacaacagagtgcatatgtagaactatagttcagattgcaagccaataatgctttcactataatagaagaactcagggtatttttgctcagtttacctggccataacaaagagttcacggaccatccgagaaccctcaccaatgtacttctgaactaactcggaaccagacaccctgatgaaggtgcagtcagtgtgatgagcaactgcacgtgccaacaatgtttttcctgtgcctggagggccatagagaaggacaccctgaaaaaagagagttaatattttctgctaatacttaaaaataggatcgtttaagatgatattgttaagaagttcaaacctttggttgggcaattccaagactctcaaatagctctggatgtttgataggaagttcaatgacctaaaagttgagttcatgagtcagaatgtgctatatgcgatgcatcaatagtacattgaaattatatacaaacctctttgatctctttgatttgctgatcaagacctccaatcatatcataagtagaatcaggaaccttctcaactttcataagattgaccaacggatcaactttgcttggcaggatcaaatgaagcatatagctatcatttcgaagagcaactcttgttgaaggtgtgatctttgtaatatcaatgcttttatcaatatccaccacatatttgccttctggatgtacctgaataattatattgagaagttaatagcactggtaaacagaaatttaggatttccattacaaaaagggctaacagaaccaaatgacaatgtgacagatcgtgagcatgtcaatacagtcacatcaagctattaataaataaatataaaaagccaaacaagaaaccaagaaatttgcacttccacatatagtcacagccataggcctaagcattcacatttttacaataacaagataggagtacttgagattcagaagcacttatgggcttgccagagtaataacatgagtttcatgtatggagttctgtgagttctggatcaccctttttatgcataactgcagagttgtctataagagcagaaataatgctcatttatgggctattaaatatgacaagctgaagtcaatcaggattaataaggtagttaagcaaagttgactatgtatggtgaactagaagattgttattgtcacagcacatagaaaaatttacaacagagagtgaatgatagacaaccacaagagatggatcaaatgctaggtttgatgcttcaaccaatcaaaattaagtaataagtccatggacaagtaataaaattggcacacctaaagtattgatcatagaaaagatcatgtaaaagaataaagagaatgtaccttcactagaacctttgatttacccatgaccttcaccacctcaccaacatacgagccaggttcttgaagcaactgcagctcttccctgagcattctaactgcaagatgaaattgcacaacatatttagagggaaatagtaaagaagaaaaagataacatttcacatgcatcaagtagaactccacaaatcaaggatagaatattcacactttacagagattcctaatataggtatagttctatattgctagaaatcacactgaaatggaaaataaggagtacaggaaccccacttaatcatgttcgtatagagggagttcagtttcggattctcaatatgaaacaatgcattagaaagttaaaagtaacacaaaatcctcatctgaaaggcaacatggaacaatttctgaaaaactaagaacatttttgcaaccaaataaaagaaatgcttgaaaggcagaactgccgtttatttactcacaactcgagaacatcggtgtataccagtaggcaatagacattcaatgcaatcaagaaactgacgatgttcaaatttgctgcctaagtggtgcccaagcgcagctaaacaaaactatcgcatgtatatagtttccaactcaaactgactacggcaatagacagtctgccgtttaaacatcaatacacgactaaagcagatggctccatttgatgcaaaatcaactatcctgtaaaatactagacaatggaggaaaagggaacaatcgaaatctgacaaaaagttgtcaagataagcaaatggccaactatagcgcaactagatttggcatccaagcgcacataaactaactgatctagagatgcacaactaaagcagataatagctacatctaatgcaaatcaagaaaaaatatcctgcaaaatactacataattgatcaaaatgggggccaccaaaatttgacggaagttctaaagatcagcatatggccaaccagcagctcaactaactaaaaaaaaatcatgcctgtggctacaaatgcgtgccatacaagtacgctagggttccctaattgcctaacgggtttggccccgagagttcttgcccaaacatcgcaactaaagatcgcgcctttggctacgatccgcacacacacccacggagtaaacctaggttttccaccaacgcacgcgccgatccaattcggccacatcaagccgcggacagcatcgcacccacacggtgatacagctagggttacgtcacctcgggagttgaggtcgttgcgctgggcctcgaggcggttgaggttgtgcgtcttctgccggatctggagctgcaggtcgtggatgtgctgcaggtagtactgccgcagcccctccccacctcctcctccggcgccgcccctccccttcgccgccgcagcctcgtcgccgcccgccgcgggagggggcttggagatgtccatcgccaccgtggccatcgccgccgccgccgagtcgctcgctttgtgtgtggggcttggctcgggtggggtttcttcttcttcttgcggtggaagaaagggaagaagaagacggccgcggagcggaggtgggtgggtttgggtttgcttgcttgctgggttgggtctccctcgtgctctgcttgtgtggctgcgtgtttatagggtgaggaactcgctgcaaacgaagccgcgaggccggcccatgtggaattcggaattggattggatcacaatacaaaaatactgctcctacgaaacaaagagttctgagaaaataaaatctttttttaggcaattttttttaaataaaacatggtacaaacgaaggcgcttataacgcgcgcacactctctatgagcatctatgaaagactgtgcctaacatatcttaagatttgcaaagtcaccacggaccatcttgttatcgatagagggtgtgtttggataatgggttataagaggtgggattgagaaatggaaatgaatagagggataggatgaaatggagtgagaaaaatagatggctaggattgaaacttaccctttgagggtgggaaatcatatcccaaacccattatctaaacatggcctaagagtaaattgcatcttgggtctgtttttattaccgtagttgcatcttggactaggtgtaaatcaaacttttcactttaggctaggtatctttacatgttggttcaatttagaccctcttcttcttcctccaagtctctctctctcccttctctttctgtatagctcaaagcacggtaatgtagctcaagcaggagcaacacaaaaaaggaaaagcttggctcatatgtaattgaggctgagcataagtgcaggattcaactaatcgtacgctaatgacttaccaaattttacgtatcttttcggtctttacattttcctctcattttaatctatttatcgtggatcccattccgatgaaaacagatctctaactttatacagtctgcagttgagtgtcactgacatatagaacatatcaaaagtggggcggcccacgtgtcagtggcaccaagtcaggagagtctcgtcccattcggatgccctagctcaagtcctcaatcaaggaacaagacagcccctctaccaccggatcaaaatccaacggccacaaaacaacctcccctccacacacacacacacacacatccccgtccgtcttcctcctcccctcgacgctcccactcccaccggagcgcggcgaccggagcaccccatctccgacgcgctatataaacccctcctccccccggctctccgtcccccatcgctgtgattacccaccacaataaaaccaatctaaccccgcctgcagatccgctccatcgattccctccctaaatcctccgccatttttttgtttgatcggagcttagggctagcgctacctccgccgcgcggcgccgtgttaggttttataggcagcagcggccgccgcgcggttggtagggctagggttttgggggtggtggtggtctggagttgcggggtggggatggatcggaagaaggcgggggtgccgctcgtgtgccacggccactcgcggccggtggtggacctcttctacagccccgtcacgcccgacggctgcttcctcatcagcgcgagcaagggtaaacgcgcgcgtgttccctgacgatttttgctttgctctgattgcttgctctggattcgttgggacttgggaggccgatgcgttgcaatgcgattgttttgtagtacggcgcctgatagataatggtatgctgtattgcaaatgtgattggtgcagctcggctttgtgtcggttttcagtaggcgctgcttgagcccttgaggttggaccataaataattgtcggtagctgaagcagattgaccatgtcaaatagttcaggttgtttagtaagaagctcaatgacctgaaattttgaattcaagtaacagaatgcgttgaatgtgatgcatcaaaagtgcatcgaaggttaaacctgaacatacactctattcattgagacatgggacccatctgttagttgttcacatgtctacagcatccattttacttggatggtctgattttcacctatgcaaaataaaaaataaaaaagatgagggaccggtatgatgttgtgcccggcttgaatgtatcatagggagtaaattcttccttaaagagaaatggatatttttatgcttatgctttgtttatttttttttgtctaaatttataattcttctttgggttaatctcaacaacaattcctgccaacctttagcttgatatcccatgtgctactcttatctcaacagcaacattgatctctttttataaattgatccactgcgataattcgaattctaagcattaaataaattcggccactgcactgctattatttggtagattcgcttcttgtggatattggatacagagtctagggaagtgtactccccctccccgcccctgagacttgacaccatacagtggaaagtaatgctgttagaatcttccatttatatgcttcacttcttgttggattaattcttctactctttatgtcgttgatattgattgatattatctttcatttctttccagactcaaacccaatgattcgcaatggtgatactggagattggattgggacctttgaaggtcacaaaggtgctgtttggagctgttgccttgacaccaatgctctacgtgccgcctctggttctgctgacttctcagcgtatggttcttgcctgttaagttgcattggtgttaattgtaaatatgttctttctgtgtaatgcaatgagtttttctccggagcgagcatctaatgatcacttgattgttatctagtgtagttcttggtagtgttgctacgatataaatgctggcatgttatccattgtggtggtattggaaattgacaaatattatgtgttgttgtttcctggagacttgagtggataggaaatggtagctaattactagatagttcccacatgttaatatacatagtacagaccattttacttagtttgatgtcaaactggtatgctcccattgataggaaatgttaaccaattactagatagttccgacatgttaatatacatggtacagaccattttacttagtttgatgtcaaactggtatgctcccattaaatattaaaaaacaaagttttatatagtgatgatgcgaaagggcattttcctcagaggaaccaaagcagcaaagtccctagaatgttactatttctgttactgagggtttgttttaactttcttaaattccttgcagtaaagtatgggatgcactaactggtgaagagcttcactccttcgaacacaagcacattgttcgtgcatgtgctttttctgaggttatattctccctgacttactgtaaccattttaaagcttcataccctctcctctctcttaataaaatcttttcatttcctgctatcattacccaattggttgctttcggtatgcagagagcaatggtgattgttttttgggtttaacctgcaaacacccgccacttcatattcactattgattttttgattatgtcaaattgtcaattatgacagactgacattacatgtggccgcatgaagtgacatgaattctattagcttagtttcactacctagacctagaatcctatttttgtagggaacaaaatacatctgcgacaactttattatatgtttattgatttttgagtgcaaattatacgaaccagccctagatagtgtttattgaactatcaatctgcacatttctggtcattgcaacaatcttttcaaaacacaggtgtaattgatattagatacctgttgatctgcagccttgcaacgttctgacctcttagtttttagaatgcaaaaattgtaccttgcaactttccttgacttttatgtcatctttctggttcactcttggaataagcacaaaattgttgataaacattgccttttaagctctaagtgatgacgcacgcacgcgcacacacttgaaatttttttgagatgattatagaaaccatctcaaagcagctgtaagcatgcaaatgtatcctaataaatcatttgaagatttttctttaaatccttgagaataattttgtctaacactgtttgttgcctattttgtcattaatttccactttgctggtcaaagttttctttcattcatagagaagcctgattaaaatgctaatgttctttcaggacacccacctgttacttactggaggtcttgagaaaattttacgtatatatgatatgaatcgcccagatgcagccccaagagagattgacaaatctcctggctctgtcagaactgttgcttggcttcatagtgaccaatctatattaagttgctgcactgatatgggtggcgtaaggtgtgtctgaatttcctttttttttcccagcttagggttgcttttttccttccctgttatgattactgtcgtggtgtagaagtttgattacagtaacaaaaagacagacgtactgttgcccacagagtccacattttgttctgattttgtgggtgttggaccttgtaaactgcaagaacaaaatattagcacctagggtaacacctacatccttgaatgtcatttccttttaaattttgtgggtgttggaccttgtaaactgcaagaacaaaattagcacctagggtaacacctacatccttgaatgtcatttccttttaaattttgcttaattttttttcattattaagacttgcaagttttagttcttctcttctctaggaagcaaaccctaatcttctctctttaaatagcaaacctatctaaagtaaccagtgtgtgaatccatttggggacatgtgttcaggactccaagaaactggcatgtagggatctgaccaatgaggttgactatttatctccaagggatcttgtctaaagatgtaatactagaagaagcataaaatatgttaaaaaacgttagtagattgtaattagctgtatattttttctcttctttgattaactttttgttgcctctgaataggttgtgggatgtaaggagtggaaaaattgctcaaactcttgaaaccaaggctactgttactagtgcagaagtaagccaagatggccggtacatcattacagctgatggttccagtgtcaaattttgggatgcaaattagtaagatattttctattcaaagcgttgttggtagtattaattgggattagctcatttattaaaatatttcctggttattcttcagcttcggacttgttaagagctataatatgccatgcaatgtggaatcagcttctcttgaaccaaagtatgggaacaaattcattgctggtggagaagacatgtgggtccatgtctttgatttcttcactggtgaagaaataagtaagtacttattacttttgaggcttaaatgaaatgtttgagcccaacagttgtttctgattatacctgcaaaagtaatttcttttatgggaacctgcaaaagtaattgatttggttttcttaatgatgccaacttcttcaagtttttggagttgtacatgccctagaaatcgttgcatggtaggttatgctttgttttggcctgccacccacaatgagcccattctgttattattttgacctgtgatgactttctcaggaagtacgaatgctaaatggtccaatttttttgcaagtacaaatcgggcacacaccacactaacgcgcagtcgctgggtgtgtcctaccacacttgtgcatgtgtatgacttgaacccgggtgggcaggtcctctgtttccattttctccctttcgcatgcctggttgagttttaacatgtggctatttgtttaaattatggaatgataacaaataaaatttcctactccctaagtccctatttgatgcaattgttgttcattcaatgtcatcgttacggaagtttattattttagaagctatgcacctaactgttgttattgaaaacagcttgcaacaaaggccaccacggtccagtccattgcgtccggtttgctcctggcggcgagtcgtatgcatcaggatcagaggatggaaccatccgaatctggcagctgggcccagctaccagtgacgagcaagagtcgccgccgaatgcaaatgggaagctgaaggtcaacacggtgagtgacgctgctcgcaagatcgaaggctttcacctccccaaggacggccagactgagggatagatactagtgcggcaccgctttgattcatgcctgggaatgtgatggtttgagatttgtgttgtcaaagctggtgttgcctgtcttgcttcccaatttccctttgatggatggtatccttccgaaccaggtggttttgcagccttgagaaaaatggtgggttttagtaacagcaatggtatttccaaaagaagatagagagagagagaggccccggggggggggggtgaaattttgtatgaggcctcctaactccaatagtcactgccaatatctaatgccaaaaggttgaaaaattataatttcgtttgcattattgtttgtgttaaaaagtagctgggtggctctaaaccagcaaagctgcaacggctagagccaacttatcccgttataaccatacaaatcaatccatatggggcaactaaagattaaagataaccaaccatacaaagactttcatgtgccacaatcaggttagaggtgagcgtcatatctcataagaaacacaaaagatgtcgtccaatcaaaattcgccaaatttggtccataatcagaaaatttggaggactgatcacacacccaagctgaagtggtgaacgtacaaccacaagacagacacaacaacacactcctgttcctaccctaacaatagattaaaagatcaaaaacaatttgcaagtaccacaaaacccaacaatccgtaatcaccttggtgcatccacctaacaaaagtgccaattccaaaggagcaccaaattaatctattcaagctcagtcggttgaaatcctggacaccctgggaacaaccacggggaaccgatcgatctcatccatccacgggttcttcttcagcgcctcctcctccgggtccaccgaccggagcgccctccacaccgcgctgttgcacttgaacccggacccgaacgcgatctgccacaccctgtccctcctcctcaccctccccttcgcctcgctgtacgccagctcgtaccacagcgagctgctcgacgtgttcccaaacctatacagcgaaaaaaagaaaagacgtgaatattaaaaaatgatctattttaaaatgtaagttattctaacatttctcacatttatattgatgtcaataaatctagataaatatgtatgtttagattcattaacatcaatatgaatatgaaaaatgctaaaataacttacattgtgaaaagagggagtatcaaataattagaatggacgagacttcgaaccaggtcgtgtttttcgaacctgtacagcgtcatccgtgacggctccatctgccactcccccagcgacaagttcttctcgatctcgtccagcaccgccctgccgccggcgtgcacgcagaagtgctcgaacgccagcttgaagtcggggatgtagggcttgacgttcttcatcttgagcagcttcttggcgaccagcgtcgccatgaacaggagctgctccgacagcggcaggacgaggggacccagcgtcgtgatgttcgtcttcagcgcgtcgccggcgaccgccatgaggtccttggacagcgcgacgccgacattgccctcgccgtcctcctcctgggtgacgcaaccgaagcacttgtcgtcgccgcccttgtgcgtccgcaccgtgtgcaccagctcgtacttggaccggcgcctctccgaccacctgttcgacagcaggatcgccgcgccgcccatccggaagaggcagttggacaccagcatcgaccggtcgttgccggagtaccagttgagcgtgatgttctccatgctgatgacgagcgcgtacgagtttcggtgcacctggaggaggtccttggcgagatcgatggcgaggaggccggcgctgcagcccatgccgccgaggttgtagctgacgatgttgccgcggagcttgtagtggttcaccaccatggcggacagcgacggcgtcgggttgaagaggctgcagttgacgacgaggacgccgatctccttggcgctcacgccggtcttggcgaggaggtcgtcgacggcgccgaacatgacggcctcggcctcgcgccgcgcctccgccatgctcgggttgggcggctcccggagcacggcggcggggaggtaggtgtcgtcgccgaggcccgagcgctcgacgatcctgcgctggaagtcgaggctggcggcggtgaagcatccggcgagcctggagcaccgcatgaaggcgtcccggctgcaccggcgctccggcggcggcttgtagcaggcgaagtcgacgaggtagacggggcgcgggcgggtgaggaagcggacggtggagaggaagacgaggagggtggtgcaggcgacgacggagacgaggttgaagcggaggtgcgaccagaggccggcgacgtcgccggcggtgagcgtggagaggtggacggcgacgagggcgatgagcggcgtcaggaggaggtacacgccgttggtgatgaggtagtggtaccccagcttcacgtacttgagccgcaccgactgctggaagtccggcagccgccgccgctcgccggcgccggcgccgtcattcgctgcctcggcgttgttgtccatggagaccttttggtaggggaaacgcagatttgtcagaaaaaaaaagtggaattttttttttttggggaggggggggggtggaattcgttcttgaaatcaagaagctaagaaatccaatcttttccctcatgtcagtaagttattggtaataataatactggtttaaacttttttaagaattcaatttcattcagaacagcaatgaatcacaactgaagaagcaccaggaaacttcacagaaatgaatattctctaacccaaaaaaatgggaattttctttgagttattggttgtcttttagtccgcttggaccaatagaccgagacaaaataagggccaactggttacttcgtggtggagcaccacatactaataaaatctctgatttcatttcccttgtcaaagctgtcataaatctcaaaaagagatcactactccaaacaagatggaacaaacttaaaaatcaaatcctaaaatttaccctgctaataaaaattcacaacccaagaacatggctagctggctacgaacagcatagggagaagaagaaaccaacgagctttcaacgcagagatcacgaggcagcagatagagagaggtgagatcttggaaaccgtaccggtaaaaaaacgaagcagaacggagaccacgacgacggcgaagaagacgcagacgatctcgccgccgccgctgtgtcgcactggcttttcgcgagcggttgcacgtaggaggagaggagaagactgggggctcgtatttatggagagcgtcggcgagaggcgactcggaaaggagaccggaaagacgcggaataaaacggcgattttctggcttagcgaaaacgtggaatcggtgtctttaggaggagcggaaggttcatgccttcttgacaatcgtgaggcgccttgaccaatcgacgtcgacgttacagtactttctttctttctttcttctttgtttgtccccagcataattcgaattacgaacgattaataaacgatgaaattttcagaacagaaacgatgaaaaacagtaatgaactttgttgtgttttatttagtttcggatgaagggtttggagtgggaacgtgccagttgcctaacttggtggtgtttaaaagttggtgtacgtaaaacgagaaagtaattagcatataattaattaaattttaattattacaaactgacaaatatatatatttaatattgtaaaacaacttttatatagaaaattttgggagtagctatatttatggtgccatatttttcaaaaaaaaatagtcggcgtgtatttacattgtaagtccctaaattacatatgtaagtttagtatatttatagtgtaagtttagtaaattacatatgtaagtcccataattacataataattacatatgtaagtgatgtgtaagtgagatataagtggggtataaatttaaattttacattggaaaagttataaaacaaaagcatatgcagcccttactttataggatatgatcaggaggaaatcgaacggtcgcgaacaggcacagccgaagacacgtagtctcgcacggagcaatcggacggacattaaagccgactgagatcagcccaaaaagatggcaagtccgaaaatttttatacgaaatataccgtttagtagtttggaaaacgtgttaacaaaaatcgaaataaaatctaaatcttacttcctccattctatgatataagtgattttgaagtatgtgatatctcttattactaccaggaatctgattaagtttcctgttcaggttcatagtactaaaaatattacttccatctaaaatttttcatactacgtgacagagggagtaatgaaaaccacaggcgcgtgaccaaaaccagtccatagtgatttttctctagatgccgatgagaccacgacgcgtgctacggagtcctacgtgaacatgtgagctgaggttctcggcgtacgtggtgactcacgcgcgcgcggtgcggtgcgcatcgtcagcgatcgagtagctgagctaagctacctaccgaccggcctgatcggatcagaacgggcgccagatatcgcacgtgcatggcatgcaaatttcgacgcgcgacgacgccgcacacgagacgtcccgcttgattgagttgagccacacatagcttctagaaggcgaaggttcattgtacggcgtcggtcagccaggcattgaccaccgatccgtccgtccgtccgtccgcctcgtgtcacggccgttacggactgacggcgatacttttgcctccgttccgtgagaggcatcgatgacgtgttcgaggagattagcaaagcactctcgtgtgtgcgtgcgttagttctttttaaagcacactacaaacacgcgtgtataatcagccatacgaacactatgatcatctatagaagaccgaaccattatgttttgagattaataaaatcaccacaaatattttgctatggacgaatatatagattgagccaatatgttttgaaattgtgacgaaatcaccacgatgtttttctatgggcgaatatgtctcttaccactttaaagatatagttagcaataaatacgtacggggaaactctgatgaacagtaattaaaccgtccgagcacccatacgtgcatgctttttcagtatattactgttacatattacatacaggaatcgttacatatttggtttgcgttctgaaaataaatgtatatatgtgtctgggtctaccatctcgtacatgttggcgtcattcagttcttaatctttcatcaacaacaataatataaaatatttttttcttttcacgaaaatataaataccccagccgtgcttaacatgccagtggcaaattctattataccaaaaccgagaaaaccagaaaacataacactagcgccaattgcattgagcctacccggaaaaagaaaggaataagttcagggtcagcgagtttaaaatccattcctaaaccgcaatactagttacaacgtatctatcaatttgtaaaaccggtgtatcttagatcccatgggagtatagtgtcgggtttcgactgatgtggtggttgagttagcatgagacccacttgtcagacaaattcagtttaactaaaaactaaaaattggtggacctcacatgcaagtaacatcttctcattcccctatttctctgtttctctcccttttcctcggcggcgtcagtccgggagaagggcgctgccggcgtgagagcagacgttgcgtgtggcgcgcgaggccacatggtgtgggcggcggagaaggagggatgggggatcgtaggatggctccggtggcgagcaggatctaccgacgacatcgacatatgggcattgccgtcgacgagttcatcgctgccgccgacacgttgggaggaggaggacgacttcctcagtgtgctgcgagcactacgcaatgccgcacgaagggtggaggccgctgccgctgggcgactgtgacgatgaaggccccgcgtatcacgcgcttgtgcgtcggatgcttgcgtggattggtgtgctctcgttgtcgattcggtttttgccggccggcttcatcatatccccgccgcccgtgccccgcagggtctgtttgctcccatgcatgacggcatcgtcgatggtaaatcactgctcggttttgcagctccttgtagttagtgttcgtgggtttgtgggtgcttacgagggaggtggagatggtgcagagcgaggagagggatcgcgcgcgtggctggcggtgtcgccggcgagaccccaggcgtggatcaaccgggagaacgtggcgtgccctgcggtccgatagagacaatgcggatgccggatgcggatgtgtgggtgctacggtctgcgctcggctggtggagctcgaggtgcggctgatgtccgtcggtcggttcaacctgtggctctagcgcgcgctagctgctgcagcacggcgtgttcgtcgccatggaggcgaaagcttggggccccggccgtgggggacggctgcgcggcggtggtgctcgcgctagtacgcttgaacaaagacgtattcgttcagcgtccgcctggccggcagtgctgcgcgcactgagagagagtggctgctaacatgtggggtctacatggatttcactcgccacattagtcaaagccggtcactgtattgtccaggaattaaagttggcacaatatcgtgagttggctatacatggtatattggttaagggacaaagtttagactcgacgacatattggaggacctaaagtaaacgtatttaacaaagaaaaaaaagaaaatactatattgggccccaacaattgcctagacagcataggctgagacctttatagagacaggtatgagtaataaagatgtgtcgtagcctcgtaggtagtaatccctccatcctgaaatataacaatctaaaaaataattgaacacaacctagtataatgtatttgaatatgagtgtagatatatctatgtctaaatgttagattatgtctaatcttcttttagatttatatttcaggacggagaaagtacatattagagcggacgatggtgaaggcatgaactgagtgaaatcatttttttgggttggtgatcaacctcccaagtcccaaataatcatgagtactggctacgtgtacgcatagcatagtcatgacagctaggcgaaacttggatgaggaagctcgtcagctttccactataattagtgatcatctcttgatagatttggctcctaacacaagttattgtcattttccctcgaaatctgctggccacatatgcaattgccattcacacatataccagagaaaataaattggagcgacaaaattaatttatctgctcatgtatataagatattgcagaaaaacaaatagcaatgaaaataagcactatctgcatcaccattagataacaagatgcaatagaagataaacaatctgctttcacctatttgttacattaccaaaatatttgctagcaataactctgttagttagagcgttagttagaaaataaaattaatttgcttgtggtaaggtggaagcatttttatttggttgttattgtgaagatgttgttacggagttgttgaaaggtggaagcatctttatttggttgttattgtgaagatgttgttacttagttagtaaattggaaagattagagcttcatttttttcatctcaattattataccataattttatcatgcttgaaattttaatctataaagaataactgtgactacttttttatgccacacatgagatttgaccgacgactcatcctctcgctactctcagtcacaccccactcattgttggttggtggtgggcttagactctgttttgcccatgccatattttcgttatattgtagcacgttcagctctagtcgctgatatctctcgacactattgcgatagaattagtgagaaatattatatgtgtactactcatcaatctatgtgaagattaccttaacaaggaggaatacctcaattagaaaaaaaaacatggtgaacatgatgttaattattggggagatgagagtgacaccataccggggaagtgtactgcacaaacgtgcgcgagacgcgaacagattcaaaattagtttttctaccgcatggcgagacggattctaaagttccctgttttggttagcctaccgtgagtccgtggagctgtcaaaagcgcgagtatttcacgagtcgtgtgtctgggccttatgagcttgacttcataaaattatatatgtctactgtgtgattggttaatgggacattctattaggttattttttattcgaatatttttttaatatattttgtatttcaatttgcaaatttagtggtatataaattttctatagaaactttacatatataaactcctttcatagaaactttacacatataaacattatatataaatactttatgcatataaactctctatataaaaacaactttatatctaattagaaagtataatatagaaaattcaatagagaaaaaaagagttaaagaaatgatatttttcaaaaattaaaaaataggaacgtccattgtgaacgaaccatctccgttaacatatgtgaacgtgattacagaaaaattaaataacattctatgtgcggaaaaatcttgaagcaactcccacgtgatcatgtcttgcatgcataggcatggtaaggccattcacaatgcgcttgtgtggcgtttggcctcaataccaaaatcgaatattcggtgccacgtactccttccgcgcggcctcccccggaatgcgtagcacactttggccacgtgttcctcagtcgcaggtgggacccacggcgtgtcaaggatgagagagggaggatagagaacggtcatcctcgcgctccacgccgccgatatcgtcagccagaggaggaaggagctccaccgtccctcgctgcccgatccgtgtccgccgtccctcgccgagctcgtcggcccccgagccgccagaggccatcgccgaggtggggatccggcggtaaggtggcgctggcgccgaatggatggggatccgaccggaagaggaggaggggaggcatcgttcgccgtccctcgccaccccgatccacggcagccggaagaggaggaggaggggaggcgctcgagcagccccgccaatggccgcgttgcccctcgatccgcgacggccagaagaggaggaggaggggagccgccccgctgaccagcaccattgagctcccgatctgttgctggcgtcgtcaccgtatgggccacccggcgtcggcgtcgccgctcgggccgtctgtgccgccgtcgccgttcgcagcgccgccgccgtcgtccgccgcgccgctcgacgccgcagctaggtgggttggcaccaccgctgccccggaggaggaaggggaggcgcggcggccggagaaggggggatccggctcgcgggcggagatagagaggcgcgcgtgacgcgggcgggctaggtggggagccgactgtgaggataagggagagagaaatgatttttttatttgtgtggctcctgtttgaggctaaatagcactatgagacttgtggcaaagtattattcttcctgtgtctttgtcctacgtggtaaccccaagctccgcaaaatgggtggcgcattgctaatgccctaaggcgcacgaatgaaagaaaggtcatgggaacggttcgcgcgactggccactggcgaacgttcgcttactagacctccttcaccatacctccgcacattggcgatgtgtctgcctcgaggacacaacgggggaggaagatggcgtcaaggggtactggcctgaatgtaacgtgtcgcccatcttcctgttggtggctgcccttatacccaccagccgccactcgccagtggtctcctttctacccgccgcttgttgcaattatcacccccgtggagctccggagtagtggtcgtgcctgagctctactgtggccgctcatcgacactatcgatggtgaggaatgacgcacggatttggatgctaggcggagagaggtaggagtggaggaggctgggcagaagaggtccgtggtagcgagacggaagcgaaggtcctaggaccttcctaggagtgacatcatcgtcgctgccaccacctagctcctctccaccgcctatcagccttctcccagccggctgctgcccaccagccatctcctcgtcggttgcgtgcactggagacctggatagagacggtgaaaagagcggagagggggagagagagaaggaatattttgtcacgttaaataaaacagtctacaataactgtcttgggattacatttgtaatggttttgaaagatgagagacatgctatatttgatattatgatttatggacgtgatttaaactccacatatgacctaaagcatcagtcaggtcttatcttttgaataacaccaccaacaccaacaaaaataaatggtgatatttttcctttcaatccatcaaaaaatagaaaaaactcagccgatgaatgagctagtggcaaattctattgcccccgaaaccgagaaaatgagaaaaagataatactatactgggcctccccgcaaaaagagagaaaaaaaaaggtaaactatattgggcttacaattgcctaggctgaggcctttgcactgcaaagcacagtaccggcaacgagctagccaactccttttgtgccgggattcatgagtttccttcgcttcgcttcacacgtatgatcagcaatacctatgtatggtcacttcaagttagggtggatgacggtcaaggtatgaattgaaatatgagtgaaatcatttcttttttctgggttagtgaacctcccaagcgatcatgaattttggctacgtatgtaaacataccatattcacgactgctaggcagtactcggatgagctggcggccggcggactccatcgtatgatcgagatcgtgaaactcgttagctttccactataaatattgaaattttgttcctaacgcaaatttacaacattattcttgggctcctaccatttccccttgaaatctgtttgtgacacattgtcaagcatgcgtagcacatgtatgagagatacgcctaagtctaggtcttaagcactaactagtccacactctacccgtgcatgcatatgagatattggagacaaataaacagtaattaggaaatgcagtatctgcataactccattcgtcgcttgtatctcgccacgtgccgttcaactaaaggatgataagggcaaccaatcagctgacacaaagccgccacatgtcgctcaactaaagaatgataaaggcagccaatcagctgacacaaagccaacaagcatgacatagacactggtggagaaaccatctttgatcggtctggcaaaatccacaatagttccgatttcataaagaaccgggagtaaagattattcttagtcccggttataaaaattttgatctttactcccaattggtaactaaagatgatctttactcccggttcatcctctgtcagatacatgtcagggggccgaatatctttagtcccggttcaccactttagtcacggttctttagtcccggttggtaataccaaccgtgactaaaattgaacacgtagtatataatccctatcccttatcctctcctccacagttacaacttagcggatcgaatctctccccctctcctcagatctctcctctctaactctcttcctcctcccctctcctccacctcctcccttcctcctctcctcccctcctccccttctcatccggcgggcgtcggggccgtgggcggcggcggtcagcggcgggcgacgagggaggcggccggcggcgggcggcggggcgcaggccggcggggccgcgcccggcggagggcggaggggcctcggccggcggcgggcggcggcagccgcggccggcggggccgcgcccagcggtcgtggcgagcggctgcagcgacatcattttttttgttttttttaatttgtgattcactgagatgtacagatttatgatttattgtttggatctgtgatgtatttgagtaattttttaggattttgtgatgtatttgatttgtgtgtataagtaactttatgatttgtgatgtgaatttggtgatgtgaatttgggatgttactttgatttggggatttggggatttggggatttgcctacttgattcgggagaaaataaaaagaaaaaaaagggggaccatctagtactgccgttattatctctttagtcccggttggtaacatcaaccgggactaaagagagggaatctttagtcccggttggtggtaccaaccggggtccggttatttcaaccgggactaaagatggacatctttagtccgggatctttactcccggttggaaaaccgggactaaagggggtttccaagcgggagtaaagatgatttctccaccagtgagatagatacaaaggggaaagatatttaatttgggaagcctctagaatatatgttatgttgtttgtttgtttctcggtatttcttttcttatgtatctctcgcctaaacctagatcttaaacactaacgagtgcacattctacccatacatgcatatgagatattagagacaaataaacaggaattaggaaaggcagtatctgcatcaactccatccatcgttttgtttgcgtgcccctttgccactataagcgcgtacctgacattggacggaggagattgcctctttgctactataagcgctgaactgcttgtgtcattggagagaggagagagcgacatggacgcgtggtgcacttgtgctgcatcgacgcctgctatgaaaactggagggaggagagagtgacatgcacgcatggtgcacttgtgctgcacccacgcatgtgatgaaaactaagagtttggtggaacgtcgatggtgccacgattgcgtgttaatgatggcgctagtgctgtggaaaacggattgtacggccgttaatgcgtccgttaattcggaaacggtgagcagtccatcacgacgagatcatatgggcttcattaatcggcaaagaacgcgtaaacccagtaattagcgactaatggacctttttgactaatcggctgtataatcaccgttattacattgcccagcccacaacaatcctacccattactgtgttctctagtatagagctgtacatttgcacttccaaatttcccgcaggtgacagtaatatgttctttccatctaatcctcttccaaatgtaatacgatgtccaacatcttatgttaatcttttgtttaaatttcaaataggtcttaagaaaaaaatatcttaaatagatgtgaagttaatgtcatatcctgtattttccctcctaagggcccatttgaatcacaggaatggaaaaacgaaggaatagaaaaaacataggattctgataggaatgtaagtgtaaaacagaagattacaaaacacagaaaaaacgtaggaatgatcgtttgattggaccacaggaaaaatacaggaatttgaggagagataaagactcaaaggattttttccatgaggttctacctcttgttaaaattcctccaaaacttgtataatttcataggattccatagggttcattcctttgattcaaagggctttgtaggaaaaatttctataggaatgaaattctctaaaattcttatgaattttctttgaatcaaagggggcctaaaaaggcaaactattatcaactatgtacatatatttgcacaaacgttaaattccgattaatcgaccgtattccgattaatcgtttgacggtaccctctccgtccgacatccgcgtaccatcttccactacactggatggcgcatgaatctgcgcaagagattacatatatatgttcgatggtagaacagtccccctcaatctaaacttcggatggtgagattgctcatgaaatcttcgaatggtcgaactgccaaggctaaagctatctgctacttgatctttagaagaaatatattctatctcaagtaatttacacgatactctttcagctaaagatgaacccctgatggccactgccacttatttctggtccaacaccatcaacacttttctattcaaccaagggccgatgaccccaactttgatcgacatcactatgatcacaggcttggatgtgacctcatcggctaacccaatgagcctgaacaccaaaaaccagtttgatttcagaaccaaaagcataggtgactggtctggttatgtagcagcatatatgggcaaaggacctgtcaccccccgagaacatgtagccttcctcctgatgtggcttgaaaagtttctgttctgtggatcaagttgcggcccaacaaccaactggcagttcttagccgaagccctagagacaaagaggcaatttcctttaggtaaaatcctcctcagctacctgtatcagatgttgaacaatgcatcggccaagatagctgtcggctcaatcatcggtgtaggtggaccatggtggttgctgcaaacttggctaaacctggtagccatgaaagctgtcaatcggccagctatgacagaagctgaattccctagattggagccgatcacagatgatgatggggaagaacgaacccaccgtaggtgcatgtcttatagagaatatgcatccacaccagccgatgctggagcaaagttatcggctgaattgctcaaggattggttttgtagcttctacgaaggcttccagaaagatgctcgggtttggttcccatatgaagattcagccaatttgaatcttccagcagatttcagatttgaggatatcaactccgaaaaatttgacaaatccagagaagtcttcttagctgctattagcccatgcattctccctgtcggcatccatcaaggaagaaacattcaagtctcctatgaattctgtcacccaatgagttcagctaggcaatttggaatgggccaactctcaatcggcttgttctttgccgataaaatccaatgccgaggagatattttatcaaccctgatgatggatcggctactcaacatcccaggacctcctttgggcagtatcgagaacatagagctggcaaggtttaggagcaaaaattttgacaaatggtggggagaatggaagcaacacatattccattagtcggcttctatgtatatgacaaacctatttccagatgtcattcctcaggtatatctttactcttgtcaattttgcttgaataattggtagctgacttgaatcttgactaatctctccctttaccttgcagacaacagaatcttctcctccacgcaagagcaatagccgcagggacatagaatatgctccaggccttttaccaaacggtggtggactagctcctcccgtcatcggctaccatgcccccaagacatcaagtctgcttcaagggcagatgagagaaccagccgatatcggcaggaagagaaagaccaaggcatctgctatagattcatcggctctggctcccaaaaagaagaccaagaagaataagcctaagctagccgatgacctgcctgccttagatccatccatcgagcaagccttggatgaagaagatattgaagaggatgttgatcaagctgcagctgaagtgacacagaaaaaactccatcggcttcacccaagcgaactcctccaactccttctgctccagctcattttcaagggtaaatcacttacattaattccctcttgcaatcattttattcatagccgattacttataaatctcgtttttgcagaaaaagaagactactgtgaagaagaaatcggcagcaacaacacttaaaccagctccaccagtaagattgtcgtatataaatcctctcacttatctgatcacagccggtatttacataacactttgtctttttgcagcctcctcctcctctttcaccacctgtgcaacagatgtgaagcgaccgtaccccatcggctacaggaagccaccatgttgaagaagaggaacaaccagccgctcctgccatcccagtaagtctttcattgacataaggacccagatcggctgaaactgtttgatatttaactatcttcaaatttctcttttgtaggtcttggctgatctgttctcttttgatatcaaggattactttgatgagacagaaaaagaaaccacaagcaaggctctagccggatccggcggaggagagggcgccgccgcctcccgctgcctccccttttgtgccaccgcttgccgcctcgggcatcgctgcctcccctccagccggatccggtggaggggagggcgcagccgccggcgctgctgcctccgccgggctgtcgtcactaggccaccgccgtgcgcacgagagagaacaaggccgagggaggcgagagaagagggatagagatgagagagagacgagagatagagatggagagataaggttgtactgataaaggccgatgcatcggcctggctcggctcggcagctcggctcgatttggataggtgcggcacctaaaatttattattggtgccggtttttaattaaccgacacctgtattataggtgtcggtttttctttaaaaaaccagcatctatactatattaaaagtgtcgggtttttttttaaaaaaaccggtacctatactataggtgtcggtttttctttagaaccggcacatatagtggcttaaaggtgccagttttatatgttttcagtcagtggatgagggaaaagcactataggtgtcggttttatgtgttccggcacctatagtgccgatctctgtgggcttttttttattagtgttcaccggtgaaccgccaaaccgatgatcgtctctgatagtctaggtacctatttcttttgacacttcaccggtgatgcctgcaatgagcctcgacccttaatcaaggtatgccaggcacgcacacgccaaaattggcgtcttaatttgttctggagaagtccagttcgtcaggcttgagagcctcctcacctatatattcgattctttaggaggttccgagagaagatcgttggcttttcacagtcttattatgtactacctccgtcccatattacctgttttttttgtttttgtttgtccatgtttgatcattcgtcttattcaaaaaattttggaattattattcattttgtttgtcaattgctttattatcaaaagtattttacatatgacttatttttttttatatttgcactaatttttcaaataaaatgaatggtcaaacgttgcaaataaaaagtcaaaaacgtcacctataatgagacggaggtagtagccaacaacctgctcctagtagttagttaatttgaatgcgcgatgaaccccgtcctcctcgatgatgcttaaggtgtgaaatgagtgaaatctatgtataattggatagatcgatcactggtcttcatcttgcttcgctcttcatctcgtctctcgcatttgcaagcagcataagttgtgtagtagctgaagaggcatccaattattttgaatatgtctctatctcaaacaccatattcagattgacaacgtcacagatctagagcacgccgtcacgagcgcacatcctgactgcctgtcacctgtccatagctctccttacagataccgcgccgcctctcacttcgctagaccgccaccgccggctcgtagcgacctccaatgccattgccctcgttggcagtggcctcccctcggtgccatcgccggaaatggcccctctccatgcggtgatagtcagatccaaaaaatccgggtggtggagaggaatggaaggggatggtgggtccagttaagaatcttccgtatatatatatagataaacatgatagtaaggcagtttaagatttactatatatgcgcaagggtgggggtggattacattagagtaaaatatttactcgaataagggtggatggtagaggcgcgcgatcggagtaaatcgtttactccgacaacggtgggagtgggatgacgtgacgtggggtggggtgggcctagacctgacgtatgtttagcgctcgaaatattagagtaccccgtctcctaatagtactactaaattaatctagatgtaattatcgtgaggaacaatttctaaattaacgtagatgcatgtaattatcttgataacctttagttagaactagtaacagtgcacgtgcaatacatgtttttcataaaatatatcgtaggagtacattgaaagtttgaaaactatatataccaaaaacaatttattcaaccaaaatttataaaatatatctcctgtgtaactgtaaaaaaatataaccagcattatcggtacttgtaaacatgggcatgactgtctattttgtacaaattttgataggagcgacaaaatagaaccgaagccagaggctatacaaactaacaaaaaaacagctctcttcgagagaattgtaccagcccttttgctctgcagctgcttcactgcttgatctcgtaaaaaagaatttgtcgacaattcgctgaaatgaccatccctctttcttgaagtttctattgtttcactccatccaaattccccagcagactagcaagaagagggtcctgagccctttgcatcttttctgatgaaatcttgtgactcccattccaatactgatcaacaggtcgagggagggcttgctgaagaaacttcagtcaagcacatgcttattcctgcccggatggctttaactaatctactcttcatgaacaagtgatgagatgtctcgaggttcgatgcataggggacaaaactaattgtttggccaacctctaagttataaattaacaacaacaatccataggcgattctaagctaggagacaagcaaaagattaatttgcacctcaaagtcgaaggggcctgacttccaaatatgttgcatcaaatctgatctgatcaatacaaaaattttgcacctcgatgagttctacaactttagttttggtgacttttccatttgaaatcattttttaaccccaatttttgttcgaagttgtcaaattttgaaaattcaaaatttgaattgttcaaatgaatttatttgtacaaaggaccgatacaatagttgtagatctcgatgagttatacaataggagatgtgaatgaatgtatatgaatgggggatgttggggtgtgacatcatcgcctagggcttaataggattaataggatactcataccaacaaattacaactactttttcggaaaccgatcttcaaagaactttggacgccaaaaaataagatttattttttttggattatactcatctgtgacgggcattaacttattgagatgagtcatctgtgacgggctatagttaatgcccgtcacagataagggtcatctgtgacgggcgctagttgtggcccgattgagataggtcatctgtgatgggtgatagtttgactggtcgtctgggtcaaagctatctgtgacgggctttaattagggtccgattaagatagattcatccgtgacggtcgtttgtccgattgaggtgaggacaaaaaagactggcctagaaaagacgggacggcacggcatggctagccaaaaaaataagatttattttttttggattatactcatctgtgacaggcattaacttattgagatgagtcatctgtgacgggctatagttaatgcccgtcacagataagggtcatctgtgacgggcgctagttgtggcccgattgagattggtcatctgtgacgggcgatagtttgactggtcgtctaggtcaaagctatttgtgacgggctttaattagggtccgattgagatagattcatccgtgacggtcgtttgcccgattgagataactcttcacatctgtgacttgtagcctgtgacggacgccatgcccgattgagatggggcttaccgcccgattgagatgatggtatccgttctagtgagttacactggtggagaagtgctttttagtcccggtttgtaaccctcctgtagacccggttttcaaaccgggactaccaatacaggattaaagatcgctatctttagtcccggttcagatacctaggactaaagatcgatttttagtcccggttggtgttatcaaccgggactaaagagaggggatctttagtcctggttgataacaccaaccgggactaaaaagagggaagcgacagtgagatggtccccttttctttttttttcttttttattttctcccgaatcgagtgggatatatatctcaaatcaaacccaaatccccaaatcaaaataacatcccaaatcttaaagttacttatacatacaaatcaaatacatcacaaatcctacaaaaattacaaacatatcacacacatcacagatccatacaaacgtgcaatgaatcacaaaactatccacacaaatgtgcaaatgggttgccgctgccgccggccgcctgccagccgccgccgggcgcggccccaccagccaccgccgcatggccgcctcgctccgccgctgccgcacggccgcgcgcccgcctcgctccgccgccaccgcccggccgccgccgcacggccgtgcgcccgcctcgctccgccgccaccgcccggccgccgccgcacggccgtgcgcccgcctcgctccaccgccgtcgggcgcggccccaccggccgccaccgccacccgtccgccgcacggctgcctcgctccgccgctgccgcacggccgccgccaccgtccgccgcacggccgccgcgcggccagctcgcttcgtcgctgccgcccggccgcagcagagaggggaaggaggaggaggaggaggcggggagggggatcggaggagaggggaaggccggaagggggaggaaggggagaggaagaaggaagaaggggaggaggcggataccgagactaagtctcggtggtttttaacgaaggagagaaaaaaggggaggggataccgagaagatatcgataatttattttggtcccggttggtataaacaaccgggactaaaaatagatctttagtcccggttgtgactaaagataattggagattaactgtacccaccaacttctttgaaccgggactaaaaatgatctttagtcccggttggtgtaatttttttaaccgggactaaagatcataaagattttacaattatctttagtccaccagtgatatattccaagttgataattaatatggattttagaaacatggcgaacacatttcacatcagatacattccaagttgataatatggtttttatcaaatacattccaagttgacgttcagaagataatatggattttacaagtatgaacttggagagtatagtataatatttcatccgaatctctttatatggtgcatctgtaaagtttcagtacttaattgtaacgcccagggcctaaaaccggtttaaggcccaagtgaatgttgggcccatacctatactgtaacactgcgctttcattcttgcttcgtacaaaatgatgtgaatcctgcgttaaagtattcggcaatccatccttataagctagtgcttctcagcccgacctagagaggtggtaatggttaggggtgaaaacggtaatggtaattcttggccgaccaacgttcgtttctgattttctacccgccgagccatatggaaatggtaatcgaccgaaacgaaaatggaaatggtaaaaaaaatggattgtttccatatttaccgtattcttgtggaagctgccatttttcagaatatggtaatcaccttatttctaaatatgtcaaatatttatagaacatgtctctacttgacacagtttagagattgattgactcttcaatcaaatctctaactcgagtgcatggctaaaatggtgttaatttataatgtgtatagtataagcttgaatttatttatacatataaaacacttatgtaaagttaaaaatatgttttatagtttaatgttttcgtatttgttaccgatttatgacatgtaccaatatgttttcgtttctattgttccttttctggttttccgatttttctgatattgttttcgttcccgacttaaccattttcgatttcatttgcgagaaaaatatggttatgaaaatggttgaggttgttttccaattgtttctgactgttttcatcgctagtaacggtattatctttgctacagtaccacacagtactgtattgtgctcactcactgaatttttttatttttatatttacatttaaaaaataaattctcgttttaaagttttttcagaaatatactcctcccgccctgccgtagggtgggacatataaatcgtcctacattagagaagtctatgtgacttcgcacctaatgccggacttcagaggcggtttaggccatgacattgctgatatcgcataactacatggacctgatcgatggagggaatgagaacccttggaaagtgccacgggggaagcaatccgccatggaggccgtcgtgatgctggcgagctacgacgccgccaagaccaccgtggaagaactccggcgggcgttcgtcaggctccatgtgatgatctgcgaagctctgcagttcaaggtgatttggaaggtgttcagggcacgagggcggtgggaggaggagagctttagatcaagcagaatatatggttcattggggacagctctcccatgccctagtgaggtggcagcgaaatggatttcgccattggctagatccagacagcgacctcggtcaatccttcaaggacattaatgtcagcaatgcgaaggatgcttggaatgtactccctccatcccaaaatatttgatgccgttgattttttaaaaaatatttgaccgttcgtcttattaaaataaacttaagtaattattaattcttttcctatcatttaatttattattaaatatacttttatgtatacatatagttttacacatttcacaaaagtttttgaataagacgaacggtcaaacatgtttaaaaaaatcaacggcgtcaagtatttagggaatagggaaggagggagtagttgattttctggttcgtccagaatcataacacacttctattatactatattattataattgtacgtatagctgccattggctagcctaatgtttactaacaataaaaatataatttgtgagtaaaacttgtatatatgtgtcctttgggagttacaaaacaaatgctaaaaaataagctatgattaaaaaactttaaatcaactctaaaattaagttttcaaaattaaatttttgttgcggcttatgagctataaggcaaacttaataagtactagcttcatactctggttttcaatgcaagccgtcattgatattttgatatctgtttaattatttgtcttattcgaaaattttgtgcaagcattaaaaaagtaacttttttttccctaatcaaggtacgctgggcacactagcaccgtgaacttatcactgtctccgtgcatgccctaaaactggaggcttcatcctggagagtaagaacaggtacaatagttctactcagcagactccaaaatatattatatcattaaattcatgcatgaaggagagagaatcgaagagagagaatgtaacgggcgactaatctatgcccgccgattgcgcacttacacatgcgattccgccataaaaaactagggactgtctatacatctgttgacagaaaatcctacctcctatctttctaattttggaccgttggatatgctttgagattcgtgcacagccctaaccctaacttttcctcccgatccccctccccctcgcgcattccgccgctgccgctcccccaccgcccgatcccccgccgccatcgccccaacgcgccgccggccgcctcgccggctggccgaagggaatcaacggtgccgacgaggcttcccggccggccccctcccctcccctccctgtcctcttcttcctcaagccgatggcggccgtcttccccgtctccgacggcggggcgccaccaccggccgcctcctcctatcaatccttccgctttgcccccgccgcttacaccggcccaccgcccgctcccgaccccgcggcttcggcggcgccgccgcctcctcaccgcccgctcgatccgccgcccaccgccgggctgccgcctcccacgacaatccctataaagctggcgaactccccactcttccccctccccctcccacccctcccacccccaccccaccccgggaccctaacttgtcggctccctgccggagttgggggtatcgccggagccagagaaaaaggggaacccgccggagttggaggagaagaagttgatgcacgaatcacgaagcacatctagtgaaccaaaatttacaagatttggaggtatgttttctgtcgactaatgtttagcaattcccaaaaagggctttgtggggccacaccgaaccccatcgataccgtgtgacttttttccctacatcggctctcatcactcttgctaaccacttcttccatccgcacaaatcgcctactcctccacctgagcccgaccgccgttcatcggagtcaatttccaccgccgttggaaaccacgtgtgccgcagaagctccgccgctgttgccagatcaaagcccatgcaccttgtagatcatgttcctctcctgctcagccatcagatcgatgcttgttgcccgctatatcaatgctctccttatgaagaaggagaaggcgttgtcgccatgccagatctcctgccgctttgtggttgttccgttgattgaagcaaacaagcagctaggagaagtggttctgagttctgttgtgtcggtggatttagggatctttttctctgttccttttcccttcttctctcgatatatgcatgttgtttatttacacagagtagatggattttaggagcgatgcaattgtgataagatttagatctttccatcaacatttcactagtagtaattatctaaagcctaatcatttttttcgagttcttgttgatatcacaagttcacagcataccgatggctacacagataaagtttagttttgatcatacacatttacgtgggtgtataattaattatttaatcaatgagatgcagcctacataagagctaatctattgtactagttatcttttattagctataaaataatataagtggagtcagctgttggctatactattggccatgctctaatacagttcgtcgttgggcttggagccattctgccgcacctatagatttgatcctttaggaagatatgagctgagaagttcatttattctttcgacctttcagcagtcttactatgtagccactctaggccatgaactgattctcctcgtttatatatatcgtttgttcgcgagcctctgtactagtcatacccttcccttgattggagcagaatcacaatgccgaggaacacatttgtcgcaaactgaagaacagtcgtcgaattaactaaagaatcctccaaagtagtggcagataaaccttgttcacttcactgcaacaacagaacaagaacacaattctgtcagtttcttcaccttttttttcctgtcctaaatgtaacattgttcgcttctataaaacattcacatgtagcttctagacttctattgcaaaaaagcgttccgatattcctgaaatttctgtgatttcggtgaccccgaaatttccggatttcggtggaaaacgaacctgaacaaagcaagcgactactcggtagaaattgctatatggagtatgcagttgaaaatcttacaagctcatcgtctcattgtgagattaacgcgatatcctattccactccagtttgcgtgaacctcgcaatgagccgcataacgttctcatacgaggagcctcctttcgccatggcccttcgagcttgctcaccgtactccttggccttcctcctcctctcctcggcctcctcgccgccgccgtccatcagcaccgacaccacccgcgcgacgtcaccccgatcaactgtcaagtactcctcgttcaacatgctcaccggcgccgtcacgccgatcggcacgccgacgccgagcacgtccacggcgagccgctcgttcaggaactggtcggcgaagtgtggccacgtcgccacgggcacgccacgggcgatggcctccagcagcgagttccacccgcagtgcgtgaggaagccaccgacggcgtggtgcgacaggatggtcacctgcggcgcccacccgcgcaccacgaggccgcgcgtcgcggttcgcgccatgaactcgtccagccattcctgcacctccggcctggacgaagcttccgactccttcaccacccagaggaacggcttgccggagtcctcgaggccatggccgacctcggacaggtgcttcggaagctttcgcaggacgctgccgaagccgacgtagacgacggagcaggtggcctgcttgtcgagccacgcggtgatcgcgcgctggtccgtgctagccatggcctcgtcgtcccggttgtgcaagcagagcgggccaagcgtccacaccggcttgccgagcgccgcctcgtagcacgccacgaactgagcctcgaggtccaggaaggtgttcaccaccacgccgtcggcggcgagcatcgcctcgatggcctcgtcacggagcgcttcacaacccggagcgttgtagaaaccggggaccgtgcccttcgtcaccgtcacacgtaccggcatcccgggcacgacgtaggtctcctgttcgtcgtcggcatcggcggcggcggctatctgctcgtgcaggccgtgcacgacggcgttgaggtcgcagagcgagtagaagcacgacggcccgtggaagaagagccgcgggatgccgaggctccgggcgactccggcggcccacgtgttgcaccagtcggagatgatgcagctcgggcgccgctccagagcgcgcacgtaggcctcgaagggcgcgtcgaggccgcgcatggctttgacaaagggcgtgaactgctcgttctccgagagcttgtcggcgctctggtagtccggcggcaggccggccacggccggcgagaacgggagctccacgatctcgaggggcagcttctcgcgcgcggccttgccggcgacgccgcgcagccacgtggcgttcagcggcgtcgtgacgaggctggcgcgtgcgccatgcgcggcgaggaggcccgcgagatcgaccatggggatgaggtgaccgtgcgccgcgagaggggcgaggacgaagtgcggctgcgccggcgcctgtgctgtggactcagctgccatcactgccttctcggtcactgatcatcagtgcgtttcccagagaccgaattttatgggactgcctgaaaaagaaggtcagggacggcgttagcacacccataaatatctactacagtagtgtcctgggactctttttccaccacctatttcttatcatctcgctcttcccttgtctcgtagcacactcctctctccagtctccacttagattcagcagtggcaaaggagcgggagtaggtataaaaacgaagcacatatatagttttcgtccgttccaaagaaaaccgctagagcacgggattacgttctaacgggatacaaatataaataaattaaaaatatagattacacaattttatatcactttagaaggtacatacatagtcaaatcagacttgcacttttgaaaaaaaaaacaactctaattgttagcggcattctcaaaatttattcaatccctactgtaaaatagtattgatgtgtcgaaataacattattaaatttatcatgaatgtatttttcatatattatggtttcttgattcatatgttattagaaaatttacgatcatatatatatatatatatatatatatatatatatatatatatatatatatatatatatatatatatattcaaaactttatccactctttgtagtggataaagttttgaatatttgtggcactcttttcaaactgctaaacagcacgttccgtgcgaaaactttctatatgaaagttgctctaaaatatcaaattaatctattttcaagtttgtaataattaaaactcaattaatcatacgtttgtcgacgagtcatactcgtggaccggatgagttgagtattggggtacgttggaacgaggatctacgtagtacaatatcaagcagacaggagacatattatactggttcaggctccttgtcaggtaatagcctagtccactttatatgcgattgatgatgaggaaccacagattacaagaaaagtagacaaaacagatgataccgacgagatcgtagtcgatgatttcgacgagatatcccggcgacttggctccgcgtactccggcttcgtaaactatggtgggtatgttggtgatgaaatttgatgccttgcacccctccctggggtcccttttataccatggatcgtcttgaccccaagtaaggcccgggaatatttgatctggtacagtataacagaaactctatcccctccaagtaggactttagaaatcgcttgactcgtatagatatttttaatttggaacaaattccaaacgttgtatatggaaatgatccgtgtacatgaaggtataccttatcggtgtattccataggtcgtaggataagaggtatgccttatccgtaacattgacaatgttaataccacatcgttttgcataaaatatttaatcttcatcattatcttcaggagaaaagaataccacctaattaagtattaaatattacaaacccgaaaatagatttattaatttttttaaagttttgtatagaaagtatttgtaaaacacacttagtttagtagtttaggaaacatgcatgctcaccataaataagggagtaaccaatctgataaatagtttagaactcagccttaaatttattatctatgtactactagaaaacgtaatatgcaatatataatatactttgtcaatcatgaatatccaaatatatcaatcgtatgtctctactaatccccatatatataagttctaaatgcaaagcaatatccaccaatcaccaagtcatactattcatgaggcattcgtacactgtacacctaataattagttgacatccaataataagcatatgtgttataccaaagataaagaacaatactaagtgggcaaccattaacaaatgataggtaagtagaggtaccaagccacaactaacaatagcaagtagattgactaggagtagtagcgtttctacacacctacatacactcctaagatgtcacgtgacactctaatatattagggaaatctaagaaaagttataagaacaaagacaaaacatctagccattgatttacacttaaacaggtggattcattattttcaaccattaaattatatctattcgagtaatccattgcagctatgactaatagcattcccgcactccaaagatgccacatgatgctctaataaattagaaaaaatctaagaaaaaatttaagaaaaacaaaacatcgagctattgatttacacttaaaccggtagatgtattattttcaaccattaaattttagagtaaattgcgttaacggtacaataacttggcaggtgggtgcgattaggtgcaaaaacttaaaaaccgagcgtagcggtacaataacttggctaggtgggtgtgctcatggtgcaaaatttgccacgtaaacaaaaattgccacgttactattccaccttagcacaattgccgcatcagctttgacgcgaaagacctatctcattttatagaaaaccccctaatatgatttcttgacgtacaaatatctcccttcatctttcttgacgtgatcgtgatcgagaggtggttgcgctggtggcgacacggcggcggcgacgacgacgacgatgagggaaaccgtgcaactacatcgcagcggcgatgagggctccgtgtgccacactagttcaagccctaaacaataaccaaaccaattcaagtccacaaactactgctgtcgacgtgattgccgcaagctttgggatggctccgactcggcgagttcttggagcatctgctccttgttatggcaaatcacttgctgatggttgtagatttctattttttgttcaattgatggatgattacgaagttaaggtctcattgatctgtacaatggctacattattttggtctttcacttgaatatcctgttatttgttattacaatgcaatgaagtgatataatggtactagccacgagattggttgtactgtaattattggtgtttcctgtagctgtatacgatataagagtaacattggcaatgataaattcttgctagatgtattttgtacccttatcagcagcatataattagttcaataatctgcaaataatcttagtgtattattttccttatgcgggtataacacatcaccaattattttgtattgcaggccatgaggaggaagaattcacaattgaactgcatcatggtgggtttttttgtggagttggcagtagtagaatttatttggatgagaaggtggactggtttgatcattgcgacactgacacatggtcttccttatggcttgatgattttattgagcaactaggatatgataattctgagaggaaggttaaggtttattggttattgcctgggaaaacatttagtgatgggctaaggagaataaattttgatgcaagcactaacagcatggttgcattagtaccaaggttcagatcattgcttttgtacacggatcatcagtatattgtggaatcgattaattaggatgatgttgctctttcaaccccaacttgtggagattatgggtaccccatacctacacggcatggttatccgactagttataggggataacttatatctatggaatatgtaacagatcatgacttgggtattacgtttccttgtatattatggaacggtctaaagtcttggtttgataatattgtaaagtagatttagtaaaccgataccgtattggttaaggtttctatcttgtaatcctgcccccatcctatataaggtgggcaggaggccctctagggggcatgagcacatatgatcgtcagatctatactacacccggcggattcaaatacccaaacaggagtagggtattacctctcattgagagggcctgaacctgtctaaatccttgtctccgcatccatccacttttaggtctcgtgtgcaacccccttttattattgccgaatttatgtttcgacagttggcgcgccaggtaggatttcgccgagtttgctggcaacaagtgtgatggaatcaacttcacgagtcgtccgcttcatcttcggtttcgggagttttacttcctcgctgccaacaacttcatcaagctcttgctctctgacttggattcaaaccggttgggagagattcaatctacggaagagaacaaacactcgaccatgataccgatatttatggtcacaagattaatcggcgatgtagtcaggagattcagatcagccgtgtcgatcgcatgcatctactgatcactgccacatatgcatgtatgcatggctgcctacgagaccatccaatcagaaggagttcgtctacaggctgctaccgacacatgtggcttgaaaccagccaaccaataagcatgatcaatcagcaatttaattagcatcaatcacatgcagattaagatcatctcgtccagaactaccaatggctgattcttcccgagtcagcaaggtcgagcaaagcatcaggatacaaattcacgaaccagatcagatcatcgagtctgttggctccaatctttgacatggatcggtttgttattcttgttcaattttattagattaatctctaattatgatttgctcttctggtgtttttctgctggtcggctgagatcaagacggagccgttggcagcgtcctcgtacatagaggttttatctatgagcgatccaaatactggagcagcgccgacggacgtcttttggccactacgggcacatgggagcagtcgcctacggcttacccagaattcatgatccaacagatcatgcattattaaggaaatattaatttccggattctaactagattttctatctatttgcatgcatgtatctctagagctaccatgtcacattgtggcagttggattttcggagttgtgatctccactgccaaccggtgtcatttcatcatcgaccactttcgtcgtcgccgaccggtttcttcatcaccatggttggttgattccgccgccgttgcagatggcgacatcattttcaccaccggccgcctacgtcgtcgtcgactggtgtcctcgcctatacggttggttggtcacaccaccgttcataggcgtccacgtcttcactgaccggcttgccttcgccgccgccgactggtgtctccgcctacacggctggcctattatgccgccgttgttgggcgtctacgactttaccgctggcctgcctccgtcgccgccgattggtgtcctcgcctatacggttggttggtcacaccaccgttcatgggcgtccacgtcttcaccgactagcttgccttccccatcgccgactggtgtctccgcctacacggctggcctattatgccgccattgttgggtgtctactacttcaccgccggcttgcctccgtcgccgccgattggtgtcctcgcctatacggttggttggtcacactaccgttcatgggcgtccacgtcttcaccgaccggcttgcctttgccgccaccgactggtgtctctgccaacacggctggcctattatgccgccgttggtgggcatcttcgctttcactgtcgaccgccttcgtcgccgccgactggtgtcttcattgttattgatggacgactttgttcccacattggccacctctgccatcaccaaggggaatattacaaagctaagtcatcattgtttattttttatatgatattttccttttcctttgcctcactacatcaactggttcgctattgactagtgagtcgggggctacagacgttatgtcatatttttcaacaatttttataatatttatcttgattgcttgcgacataatctgagtacaaaagtgcctatcgagttatggagttctatcttcctatgctttccgtttggtttgtcgatagatagttgtctttgggccgattcctagcacctgggggctcgctggatggaccgagtaatataatgcctgttagggacaaaactgcttgggtgaagatgaatggagtgaaggtcaacccatcggtttatgaaaagaaagtcggaaggcctagtagatgtagaagaaagcagcctcaagagtcaagagcttgaaggaggagcaaaaatatccaaatatggtgtgcaaatacactgtagctactgccaaggagttgatcacaataagaagggatgcaagaagaagaaggaagatatataaagtggaaagcagtaggccagtgctccttctctacagcctgttcaagaaaatgatgtgcctttgcaggtcatgcctgatattctgaatagtcagactagtattctaactagtcagccaaactacaaccagttaaacaatgccatattgtcttccttgattagagaggttaggcaatgttttctcaattctccattttgtaattttgtgaaacatttttccacaatttcagagtactttgtgcagaacacaatcaacagctcttctagagttgcccctggtccattgccggaatcaaattttattgccacaaacagaagggctggagtggagccaccaatgacgaccgcaaccaaagagggcaaggcaacaattaagaagaggatggcagagccaaggaagataaatgcaccacctaataagaaatcgatgccaaataatcaagcagaaccaaagaaaaggaaggagacaaagaaaaaatgaaaacagctagtaatcaattatatgtggaaaacattagcatatgtttcagtcagagagttttatttagtttcataccagccagatagacatgtttcataagatacattagtctgatttccccgttcttgaacagtgtttattttgcaccttttattttgttatgggcatgttggtttcttcatgaatttcagtatgaaaatttctacctggatttatttatggacaagaaaatgtcccacattatatatgcgtatagaaattccctacattgcaagtggtggtcaaaacaagctggtaaaattatgacagattatcgcttgggctgttgggcatgaagtataccaaatgtctcattcagacagaagcatacaattctgaatttttcgtaccaatttggaaacaaattatttgaggcagcttttgattgcatttggaaaatcacttacagagtacttaataaaagcacagaggacctttatatcactttcatcataattcaatcactcccagagtacttacaaaagaacctacaggaactatacatcacttgcatatatacttctagttacatatattgcagaatatccaaacccctgtagaggcagccaacacagagaagtgtcacttcgtcggtcctaaaattgctcaccagattgaggcatagctcctgcgtgactgcgtctgctggttgcttgtcatcgcgacagaaggtccggcggggatcccctgtactcgtcgcgtccggcggaggcggcgccgctggctgtggacgaggaggggaacagggactcgatgttgtcggagactcgatctgcgcccagcgaatgtggaaggaaggagccagcagcggacgcggcactggtcatggcgccgccggtgttgccgaacctgtaggacgtcgaggtcgtctgctcggtgacctcgggctgctccgtcgacgccgcggcgggcagcgttgggtcctatctttccaatctttctactccctccgtcctataatataagggattttaaatttttgcttacactgtttgaccactcgtcttattcaaaaaatttgtgtaaatataaaaaacgaaaagttgtgtttaaaatactttggataataaagtaagtaaaaaaataattctaaagtattttaagcacaacttttcgttttttatatttacacaaattttttgaataagacgagtggtcaaacagtgcaaacaaaaactcaaaatcccttatattgtaggacggagggagtaccaaacaatgggaaaacagatacatctgacgaagaagtgattgtaatataaaagttactagggacttttctgtaaaatgagatggtcaatcataatgtggcactttcgctgaggtggaacaatggcgtggcaacttttgcaccatgagcgcacccacctagtcaagttattgtaccgctacgctcggtttttaagtttttacacctaatcacaccctcttgtaccgtcaacgtaatttactctaaattttatatattcaaataatccctcgctcataagaaaggctaatccctctctgcgtacatgcatacataagagatgtcaaaaacaaaaaaaaacaagaagaagatgagtgtgcttacgatcagccccatcgagtatttttctctctttctttgcagctctaaggtttttcttcaattgtgaatatatgtagtgaccacccttggcaaggttgccaaataagacatgctgccgcaacacgacttcacgccatcttgcaaatattcttaaaaatattattttatattgtaaggcaattagaataaaatcataaccactatccaaaccagttgttaaccataacatgtttaaaatgatgtcaaagaatatttcaaaaatattatccacacataaatatccataataaaaatttaaacaacattaaatgaaataaggtgcccgcacatttgcgcaggctttcttcctggttgtagaaatagttataaagaaaaatcaaccttatattttttttatgttttcaaactagctagacattgttttctagagttattggtggtcaaagttgctttaaaagtttagctgcataaagttaaccatgtcattaactatggagagagcatagaacaatcttaatatttctaaacttgttgcgaaattatgagtaattaaactctggttacagatagtatcaggtgacagttattcatgaacggaaggagtacaaacaaacctagtgttcttccactccagtttgcatgaacctcgcaatgagccgcatcacattctcatacgaggagcctcctttcgccatggcccttcgagcttgctcaccgtactccttggccttcctcctcctctcctcggcctcctcgccgccgccgtccatcagcaccgacaccacccgcgcgacgtcaccccgatcaactgtcaagtactcctcgttcaacatgctcaccggcgccgtcacgccgatcggcacgccgacgccgagcacgtccacggcgagccgctcgttcaggaactggtcggcgaagtgtggccacgtcgccacgggcacgccacgggcgatggcctccagcagcgagttccacccgcagtgcgtgaggaagccaccgacggcgcggtgcgacaggatggtcacctgcggcgcccacccgcgcaccacgaggccgcgcgtcgcggttcgcgccatgaactcgtccagccattcctgaacctccggcctcgacgaaactaattccgactccttcaccacccagaggaacggcttgccggagtcctcgaggccattgccgacctcgaacaggtgcttcggaagctttcgcaggacgctgccgaagctgacgtagacgacggagccggtgacctgctcgtcgagccacgcggtgatcgcgcgcaggtccgtgctcccagtcccacacgaagccatggcctcgtcgtcccggttgtgcaagcagagcgggccaagcgtccacaccggcttgccgagtgccgcctcgtagcacgccacgaactgagcctcgaggtccaggaaggtgttcaccaccacgccgtcggcggcgagcatcgcctcgatggcctcgtcacggagcgcttcataacccggaaagttaaagaagccgggagccgtgcccttcgtcaccgtcacgcgtaccggcattctaggcacgacgtaggtcgtctcctgttcgtcgtcggcgacgatctgctcgtgaagaccatgcacgacggcgttgaggtcgcagagcgagtagaagcacgacggcccgtggaagaagagccgcgggatgccgatcctccaggcaactccggcggcccacgtgttgcaccagtcggagatgatgcagctcgggcgccgctccagagcgcgcacgtaggcctcgaagggcgcgtcgagggcgcgcatggcgatgagaaagggcgtgagctgcgcgtcctccgagagcttgtcggcgttctggcagtccgacggcaggcctgccacggccggcgagaacgggagctccacgatctcgaggggcagcttctcgcgcgcggccttgtcagcgacgccgcgcagcctcgtggcgttcagcggcgtcgtgacgaggctggcgcgtgcgccatgcgcggcgaggaggcccgcgagatcgaccatggggatgacgtgaccgtgcgccgcgagaggggcgaggacgaagtgcggctgcggcgaaggcggctgtgttgtggactcagctgtcatcggtgctgtcatcagtgccttctccggtcactgatcatcagtgctctcccagacaccgatttttatgggacttccagaaaaagaagtcaaagatagcacatccgtaaatatctactactccctccatccttaaatataagaagttttagagggtgtttgggtgagagtcactaaaaaaataagtcttttttggtgagagcgactaaacacccttttagagttaggcacggttattaaaaaaagtagataaaagtgagtggtggatggttgtaattgaatgagtactactccctcctgtttcattttaattgacgttttggacaatgacacggactgcaaaatatatctttgattttatttttctattataatatatataataaataaatgcatgtgtacttttattacagtgctttgaaagacaaatatatatatgttctagtttctttaatgattaaagttataaaagtttgacatcaaccttgttcaaaacgtcaattattatggaaccagagggagtaaggtagtgggaaaagtgaatggtagagagttttgattggttgggaagaaaatattggtacagaagttgttatattttagaacaaatcctgagagcttaaattattatattttaagacggagatagtaccgtcggtttgggactctttctccaccgcttatttcttatcctctccctcttcccttgtctcgtagcactctcgtcactccactaagatgcagcagtggcaaaggagcgataatagggataaaaactaagcgcattgttttatgcttccaaacaaaagttttttttcctatcacatcgaatgtttgaaaatatatatatatggagtattaaatatagaaaaaaaatcaattacagagattgtgtgtaaattatggaacgaatcttttaaacctaattgctccctgatttgataatgtagtgctacagtaaatatttgctaatgatggattaattaggcttaataaattcgtctcgcagtttacagacggaatctgtaatttgttttgttattagtctacgtttaatactttaaatgtgtgtccgtatattcgatgtgacacgctaaaactttttgggttgcgaactaaacaggcctttagtctgttccgaagaaaaaataaatacatatatcgtcaggagcagataattttcgaatagtctgatacggatacgaatagttaagcaacaagaatcaggcttgatttgctttctgattcaggcaagataatagctgacttttagttttttttaactagaaaaaatacccatgcgttgcaacaggcgaaggttattttaatcttatcattattatacggtttagtaaaggtaaaattcattgtagaaattcgctttcgaaaatcatgagctgcaattaggagtctgatcgtctcaagttagcatgcgattttttttaaagagacttcttatgcgactccttctgtattttcaaaagcgaacgaatttaaaaattgactaaatacggatatgtatttaaaaagcgaatgaacttaaaaccgacttatacacggataacgtaccaaagtatcagcaaatacatatttaatttttataatagtagagtataataatagagatagatatatatagatatatattccttcaaaaaaatatataaagatatatataacatgagtttatttgtacttgtagatgtttttttagccgctaaaagggggcgtggctaatgggcaggtgatcacccacagcgatcacccccatccccctgtacgctcttcctctccccgcttcctcctccccttcttctcttcctactacaccataatcttttttttaaaaaaataaagttgaaaaatactatatatataaattattnnnnnnnnnnnnnnnnnnnnnnnnnnnnnnnnnnnnnnnnnnnnnnnnnnnnnnnnnnnnnnnnnnnnnnnnnnnnnnnnnnnnnnnnnnnnnnnnnnnnnnnnnnnnnnnnnnnnnnnnnnnnnnnnnnnnnnnnnnnnnnnnnnnnnnnnnnnnnnnnnnnnnnnnnnnnnnnnnnnnnnnnnnnnnnnnnnnnnnnnnnnnnnnnnnnnnnnnnnnnnnnnnnnnnnnnnnnnnnnnnnnnnnnnnnnnnnnnnnnnnnnnnnnnnnnnnnnnnnnnnnnnnnnnnnnnnnnnnnnnnnnnnnnnnnnnnnnnnnnnnnnnnnnnnnnnnnnnnnnnnnnnnnnnnnnnnnnnnnnnnnnnnnnnnnnnnnnnnnnnnnnnnnnnnnnnnnnnnnnnnnnnnnnnnnnnnnnnnnnnnnnnnnnnnnnnnnnnnnnnnnnnnnnnnnnnnnnnnnnnnnnnnnnnnnnnnnnnnnnnnnnnnnnnnnnnnnnnnnnnnnnnnnnnnnnnnnnnnnnnnnnnnnnnnnnnnnnnnnnnnnnnnnnnnnnnnnnnnnnnnnnnnnnnnnnnnnnnnnnnnnnnnnnnnnnnnnnnnnnnnnnnnnnnnnnnnnnnnnnnnnnnnnnnnnnnnnnnnnnnnnnnnnnnnnnnnnnnnnnnnnnnnnnnnnnnnnnnnnnnnnnnnnnnnnnnnnnnnnnnnnnnnnnnnnnnnnnnnnnnnnnnnnnnnnnnnnnnnnnnnnnnnnnnnnnnnnnnnnnnnnnnnnnnnnnnnnnnnnnnnnnnnnnnnnnnnnnnnnnnnnnnnnnnnnnnnnnnnnnnnnnnnnnnnnnnnnnnnnnnnnnnnnnnnnnnnnnnnnnnnnnnnnnnnnnnnnnnnnnnnnnnnnnnnnnnnnnnnnnnnnnnnnnnnnnnnnnnnnnnnnnnnnnnnnnnnnnnnnnnnnnnnnnnnnnnnnnnnnnnnnnnnnnnnnnnnnnnnnnnnnnnnnnnnnnnnnnnnnnnttcgaccagtggtcttaggtacacatcgatgtcgttaccaggttgcttggggccttgaataataatcggcatcattatgtacttcctcttcatgcatagccagggggaggttgtagatacacatcgtaacgggccaagtgctatggccgctgctcatctctccaaaaggattcatgccatccgtactcaaaccaaaccgaatgtttcgtgcgtcctttccaaattctttaaattttctatcgatgtttcgccactgcgaaccatcggcggggtgtctcagcatcccgtcctgttgacgctcttcagcgtgccatcgcaacattctagcattcccctttttcctgaacaaacgcctcagccgtggtattatagggaaataccacatcaccttagcaggaattctcttctttgttagctgcccgtcaacttctcctggatcgtctcgtctaatcttgtatcgtagtgctttgcaaacagggcatgcttctaggttctcatactcctcaccgcgatataggatacaatcgttcggacatgcgtgaatcttatgaacttctagtcctaacgggcagactatcttcttagcctcgtacgttgtctcgggcaatttgtttccccccggaagaatgtttttgatgagtttcaataaatcgccaaatgccttgtcactaagcccattttttgccttccattgcaagaactccagagtagtatccaaccttttgtgcccctgctcgcaacctgggtacaacgaagttctgtggtcctccaacatcttgtccaatttatgggcctccttttcactttcgcagtcctccttggcgtcctgcaacatctgaccaagatcatccgcaacgtcgttaccatcagcagctatttcctcctcgcctgtttgattttcttcaaatccaacatactgagcaaagtccggaatattgtcgtcttccacttcatcttcttccatttcaacaccttgctctccgtgggatgtccaacaattatagcttggcatgaaccccaactcaaacaagtggaaatgaatagtcctagatgcagaatactccttctgattcttacacttattgcatggacaacaaataaaactcctttgcctgttagcttcggctactctcaaaaaatagtgcatgccgtcaataaattctttggaccgccggtcagcgtacatccattgccgatccatctacatgagtcaaaaaaaaccgtacataaataattattcttacaataatgacagtcatacaataattataagatatctttattcatataaaaatcataaaatattacaccaaataattcttaaaaactatttgtaaagttttaaactaattttaatgtgttttacttcttttaattttcattttagtttgttttctattatttaagattaactttcactagagttttccttctcaactattttataaaaccttgtttagcaaatgaactaaatttctatatattctttcttccccacacacattttctctctcatcaacttacaactaaattttggagaaaaaaaagtgtgcaaaacataggtgcaaatgtagtatgacaaaaaaaaacattggaggatgaagttgcaaaccttttaggcacctccgatttgtatgtaatcaccaaaataaattcaatagaaattttggcatgacctcccctcttttttgaagaaattttgaagcttgctcgggcagctggaggaggaagaagacatatatatatatatatatatatatatatatatatatatatatatatatatatatatataggggtgggactttagtcccggttggtagcaccaaccggggctaaagatcaccaggatctttagtcccggttggtaataccaactgggactaaagatcccgggggggcctgacatgccctgacagcattcgaaccgggactaaagatgatctttagtcccggttggtgtgttaccaaccggcactaaagatcaaatatgctcgttacccttttgaaccaggactaaagatcatctttagccccggtttttattgcatccgggactattgtggaaatcggccaaccgacgaaagatggtttctccaccagtggacgttacaattgtgatcggttgatcacagactacggtggctcagaatcttcaatcctagctagattttgccagggcggcccaaggaagggccgtccaattttattaagatttgggatatataggtacatagctatgcatatacgggtaacaaacatcgacaggagactgtcgaaaccaaagagataaaactgtccgacaacagccccaaagagaaaaaactgtccgacaacagccgggtcagcaacattataactactcatctagttaaagtggcaaaatgtttttgactggggttaattgatcaccaccgaggcaagtgtacaccagagcaatgcatccccttcctacggccacctctttaattacacgaaacaggaatattccatgaagcatgcatgcagaaacaattgggattaaagagcatcagagtttacagtgaaagcgaaggcttctgcttctccatcaaatgcgtatcacttttctcatgttcaactctgcagcagcacaaagctagcatgtcagtgcagtagtgcacatgctgatcgatcaataatgtaattgaaatcaagtagatgaaaaatctcccttattaaatttcacaggaaagtggagagatacagatagctaccactagtttttttatatataagagttgagaccatttaataattaatggttttgttagaaccatctgtcctattctatgatacaaacaaccgcatctaagaaatcacttgttctttcagaaccttcatagttaattcctagatggttgcggccggtaagcacgtgccgtcgattgaatttgacttctgtgtgctctagggggtgtttataaagggtatcgtatggggtgttcggatactaataaaaaaactaatccctccattctaaaatataaggcataacaactcctaacctaaaaatcaagaaaataattattatcatattatagtttggatcatcctaataaatacaatgcatgcatctaacagaattagagaacatgagagtggatgatttaaaaaagtaataatttaatggagaagaggttatagttaatagcctacatgcatacatgccttatattatggaacatctaaaaaaagtggttgtgccttatattatggaatggaggtagtaattacagaatccgtcagaaaaccgcgagacgaatttattaagcctaattaattcatcattagcaaatatttattgtagtaccacattgtcaaatcatgaagcaattaggcctaaaagattcatctcgcaaattagtcgcaatctgtgtaattagttatttcttagtctatatttaatacttcatacaggtgtttaaatgttcgatgcacgtggcatggtgaaaaattttaaagtgagatctaaacagggccctaatagaaagaataaagccatatctcctataggagacaaactatggtctgtacctcaaaaatcagcatgcataataataagatgatggctaaagagagaactacacagagttacatttactcaggtccaataactagtacatctattatatatatcattgaattgttagtagtatatattacagtcacatactcaattgggatccatcaaaattgcactacaagccgaagtttccatgaactacatagaagtagcatgtgtacacgaatgtgcggcgcttgcacttagtcgaggcttaggaggcatgaggaattcagcgtgcacgaatagtaggagtcatgcctccacctcatagcggctatgcgcctacgatactttgggtgccctggttggggtttgcctggttaccaatttgtatgaatgcgtagtaccagtagcaatgatccagtgtggctgttgctggaggacagtggcgtagttagggtttagaataaggtggtccatctctaaatttaaggacaagattaaaaggatggttcatatatatatatctttatgattttaagcaactactcctatctaccatagttttaactttgggtcaattttagtctggtctgtggctagtgtcacctagttagctctgtctatgactgattgactgaaggctttgtacaggcagccacgctgagtcctaatactgtgttagataacatcccataccacaagaattttctagtggattttgtcactgcatgttcctgtttctccttgtttgatattgctgttctccttaacttcttttttcacaattttgcatatatttttgtgtgtgttatgttatcaatttgtctaaaacataggtcgtcaacttcctaaacaaaactgaaaccaataattgtatcactatattcttttagttggcaacttggcaatacggaatgccaatatatacacttccagagaacactttaggcagaagagcaactaaattaccaaaaagaactgaaaatgactgaaatgtgcaattgaatatgggaacacgtggaacatggaagagtagacaaatacagatatatattacggaactgttaggtctctacttgtaataaaatcaaagatgttttccgaaactcgcactatatataaatgtaattcccatttgcacaatttggaggctatttgcatataaatatcgactatttgcattggaaaagctggataaaaaaataaacatcaaggaaataataattattcaacggcctgtcccattttgtgcaaatgcccacatgcacagcagcacattgtgacaactgacaatatttatcatggttttttgaaaaaaaaagttcccatttttctgcaaaacggttagctctttcagcctcattttctacaaaacagtgggccgatgttaatttaataattctcttgcgacccctgttttctgcaaaacagttagttagtcgtcacaaattgccaaaatgttttgttccagggatgcaaatatcatcagccactaggctgcctgtgtctgtgtgtatatgtgtgggttttttttttctttgaagatctaataattgtgttttgttgccagttaggtcctcctagaacgtatacccagtgactgtacttgtggctatgctctctggaacactgtacgggtttgtttagtttagagctaatttttgtcctatcatccctaaaaaaaatagtttgtcttaccaaaactttagcaacttcaacggtacgtatcaactaaatgtttagtttgttaccaacttttatacacactagttcaaatttttatactaaattgatagtggcaaaacttatgaaggttttggcactactaaaataaaattttgataggaaaaaattaactctaaaccaacgagccctacatttcaacatctttaggatcgagcaagaaaacctcacatgtagtgcttctatcattctttctctcactaatcagacgcaaacaaaaactgaaagcgattgtgttctaaagcttcagacacaaggtttatcttcaacttaattacgtgatctttcaggcactatggtctcataatataagggattttgagtttttgctaatagtgtttgaccactcgtcttattcaaaaatttttgaaattattatttacttttttttacttactttattatctaaagtactttacgcacaactttttattttttatatttgcataaattttttaaataagacaagtggtctacaagtaaaaactcaaaaaacagagagagtattagaaaggcaagatgaaaacgattacatctagaaatcaacctgtcgtagtaccacaattatgcgaatcaacatcaaatctggtctggcgttcaggcgtggctaagctagctgctaactgcttgactgggactgatactgtccactccatgaggaagaaagcacaagccaagaaacgcacgcaagcaagcatgcaccgtcaatcatttttcatttttgtggtgctccagtgaaggtctctgcaaccatcacaagcttcgggtgttttttctttccaataatgaatctacagtccactgaatcctgacctctataatcatcacaagacgatgattggtgacaaacatttgtggcgctaaattaaatcttgggacaaatatgtgtactaccaccgtcctaaaattattgtcgtttgtttggcaaaatgtgagttttacaagaaaatatcgtagtacccctattaaatagtgcatggatgggagtgacgatgtagttggtggtaagatggggaaaattttgaattggaaatgattgatgtaaaacaaaaaaaagctccaaagtgacaagaattttgagataaaattcaaatcctagctagagcgacaacttatatatttaggatggagggagtaattatatttatgacattatacttttcttaaaaaaatcatgttgcctttttacattataaatttaatttaaaacttattgtaggattacattataaattttagtatttatactattttttctaatatgtagatagaattagggttaacaataatttattatctacttgagcatgtattttctaaaagtgattcaaattaaaggaaaaatgtggtaccatacttttagcaaacccaattataaataaagccaatatatcgtacaagttttgcaagataatcaaatgtttcctgtaataaaatcgcactcctaccgtctcattagaaaaaactgagtatttttttttatcagggggaactattttaaatgtacatgtgcgaattagaccctttttcctgatctaatatacaatcgagaacgtggagggcgagtaaagggattcaggaacagagatctgattgcaccgacttacagcatcatcagcaggtatcctgcaaagcaataatcaatctagtgttagtcttagacttttgtctcatgaaaatgacaaaagcactgtcatacacacaaggagaacaagcaaatggtcatcattggtttattagatcgagagatccaaggaaggcatcacaagtggcaaagagttctttgtcttttctagatgaatagaaacactgagctcactttttcttctaagaaacacagtataaatacaaacgctaataacacatatacacaccattaataattcatgcacgtgcactttacctctgtgtgcccctccgaaaaaaataggccgacacaccttaagatttaagattgaacgattcattctcgatgaatacattaattgctctaacactaaaataataattagttgtaaatataagtacccgtgttaagtttacgacttaaatctgattagactagttaaaaaaaacctaatcatttaagctatactcacttcgcagcattgagctcacttgatagcggcagactcgttgaaacatacagatgatccgattgtggagagcattgcaaggtgatcatatattcatatggtggccaaacgtgaaacatgagaggccacaaagctgacaaccttataccctgatatcaaccagataaaatgttcaggtagagcaatttcaaagtagtgcagaaattggtcgcctgagaaaaagccaacaattcctagccaagaaacaaagaaaccgaacaaatctttggttccaactagaaatattctgatttctgaaaaggcatgcatttcttggattctcagtccatattgtgaagaaagtctgttcactactaaaattacattatccattaacttcttcagaataagaaacacagatgacttgaagaagtaaatcagtgtaaatctgatgccaacaaaaaggaaaaatattcagaaaacagtgtgtaacttctggattcaaatgtgcttttgtttgcacctccactgtttactgttctggagcgttcttggctccctgcagggtgaagctgtgtatcagctgcgtcaggctttcgtacgaggatcctcctttctccatggctctgcgagctttctccccgtactccttcgccttcctcctcctctcgtcggactcggcctcgccgctgtccatgagctttgacaccgcccgcgcgacgtcaccccgggtgaccgccatggcctcgtcgccgaacagcagcacgggcgccgtcacgccgaccggcacgccgacgccgagcacgtcgacggcgagccgctcgttcaggaactggtcggagaagtgcggccacgtcacgacggggacgccatgggcgatggactccagcatcgagttccagccgcagtgggtgacgaagccaccgacggcgcggtgcgacaggatggcgagctgcggcgcccagccgcggaccacgaggccgcgcgccgccacacgggcctccagcgcggacagccattcttgcacctccggcgtggccacctccgacaccttcaccacccagatgaacggcttgccggagtcctcgaggccatggccgacctcgaacaagtacttgggcaccttgcgggcgaggctgccaaagttgacgtagatgacggagtcggtgtccatggcgtcgagccatgtggtgatcgcgctctgagcgacgtcgggcgtgttcccgcgcgacgccatggcatcggcgtcccggttgtagaggcagaacggccccagcgtccacaccggcttgccgagcgcggcctcgtagcacgcgatgaactcgtcctcgaggtccaggaacgtgttcaccaccgcgccgtcggccgtgcgcatggcctccatggccgcgtcccgtaagtcctcccaccctggcgagttcaagaatcctggttgcgtgtccttggtcacctccacacgcaccggcatgcccggcacgacgtacctgtcgtcgtcggcctgctgctgcagcccgtgcgcggcggcgttgaggtcgcagagggagtagaagcacgacgggccatggaagaacagccgcggcacgccggcgcggcgcgccacgccggccgtccacgagttggaccagtcggagatgatgcagctcggcggcgccggcagcgcgcgcaggtacgcctcgagcggcgcggcgaggtcgcgcatgacgtcgaagaacgggcggaagtgggcgtagtcggtgatctggtcgacgttctcgacgcccggagggaggccggcgtcggcggccgacggcgggaacgggacctccactatctcgagcggcagctcggcgcgcacggcgaggtcggcggcgccgcgcaggcgcgcggcgttcacgggcgtgacgaggaggctggcgcgggcgccgcgctccgcgaggaggcgcgcgaggtcgaccatggggatggtgtggccctgcgccggcaaggggacgatgacgaaatgcggcggcggcggcggcggcggtgacgtagcagaaacggactccagcgttggcgccatggtgggcacgagagcggtgcgagtggcagccaaaaaagcttttgatggtgtggctgatgtgggagattggatagagcatagagagagtgatttatatccatcaaagcggtccagcttttttttgtttttgttttttttttccgccattctagaagcttttgtgattatatctatctcgatatctcttctaatattggagtttagttattgctaattatgaaaaacatacctgtgcctttgtttagctagctactgctagggcgcttggctatgcacatcctttcggttttaggtgtaaaggggaagtggattttcatccctgaaggagatatcccctcgttatttgtatgtcacttaaatggatatgaaaaaaatttaaaaaataataagaagatgtattaacatgtgatatatcactccacaaatatgcaatttcatattcaacttttacatctcgtaataaaaaaaataaatttgactgtgaatatatgttcactagttatagtttaatttgtttttttcgttgtgagaagtagaagttgaatttaaatttgcatatttgtggagtgatatatcacatgttaatacatcttcttaatttttttcaacttttttcataatcatttaagtgacatgcaaacaacgaggagatatgtcctcgagggatgaaaatagtttccggtgtaaaggccgtgttttttttcgaaaaaaaagctagttgctctgctataagtaaaagctatgcatttatgcaacattttgttatattttgatcaacatatttagtaacatttaaacaattgacgcttagttaagttatttatcggaataaccttcggttgcaccactattttgatgtatgtttgaatacagccacatcactatttatggcatggcatggtattttccacacatgatcgctatatcgaaacgtgggaacgaacactgccaaacatgaacacgagctatagtaggccgagcagattaattggatgaagaaaggtttgtaaccatcgaggtggtccgtggatgtcttttgtttctctctagaagctttaattggtgacactattgcatcatctagcttatctatgtattatctctctaatcttctctcattaacaaaaaaaaaacttctctaatctttggacctgttcatattgtagccaaaataaaccttaccaaattttaacaagatgataatattgccaaaattttaacagaatttcttatgtatttaccaaatttggtaacaaactaaacgcacatattttttttaactttgccaaaaatgatatgattgaaaatggcatcaaaataaaccggcccttcaattattattatatgctaaaagtggaaaattatcaacatatgtctagctataaagaggtactaaaaataaaagtacttatatctatatatccaccaatttttatatatttaataataaaaaggaaacatacatctaaacatgtttaataatattctaacaatagacccttaataaagttacgtctaaaataacctttaatcacaccgctagaatttatcatgtttttaagtaggcaaaatttactatacgactgttgacaaaaacacgagaactgggagatttgcttaactccagtgcaggtccaaagctcgccttcgaatgtatgagcgtgccagttgatttgatcatataatcaacaagaaataaaagcaaagaaaccgcagttaaatctataaatgatagccgatcggctaggtgccgatgacacattatttatctggcagccgatgtcatatgtgaatcgatcggcggttgtaaataggcaataaagaactaaatctgtttgatcagctgtaaatattaacaatatatagttcctataccgatatatacttaaatcaagtgactgggatagatcggtcgccatgccgagacagtatgaatcacttagatcaaaatatatattgataacagccttatatatcttaatagcatagctgatcagatagatctagcatgtatcggctaatactccgatactactctatatcaggatactaaaacaagtaaaatatatcaaacaagagcctaatatacttaaatgcagtaagatcttgacataaagggcagatttaatgtatcattgaagcatatagagcaaatacgattaaatcaggtaagatcggctgaaactccgacgctactctaatcggcgaccagagggcaggctagaaattgatattctaagcatgactttatagatcaaactcaactgatgtagcattaagtatgaaaataagaacaatatctagacaatcaagccgctggaagtttcatagagtagtagatatcttatataatctaggtcaacgtcgctatttaaacaaatcggctgccttctgttaacagatgttagccgattgtaggttagatgacgatattgtcgaagattatgtaagatatatgataacttgacgaattacatagacaagattagagtatcataaagatggaagcactaatcccgagaacataattcatcataacaagttttacctcttgttgaagatcgaaaccgatgcagctcaacccaaaagcaagaactcgtcgaaataaaactaaagcaaaaagggtggcgatgcgccgagattgtattgaacgtatgtgttaaaagttacatagggctcgggtctatttatacccgagaattacaagatatgtccattatggacacgactactatctctcacaaactctaagataccataagtctttgcggcagacttttgcccaaacatatctctaaggtaattacataaaacatcctaattactagatacaattgccttctcatgactctatcatgtgcggcaatcaccttgaagcgcctcaattcaacccgatatcatacagttgcattgtcggaatcggctgcatcggcttacctagcccgactcagacccaaccgatcctactcgtagccgatctggactccagccgattcctgctctgtttccgaactcgatctccgcctccgactttgcttcgatccaatcttctttcccgatgccgatattaccaaatttggttgttaacacatgccccccaagtacggaatatttgataatgtttcggatttgctgtaaatcgactccgagcaagtttcgcaccttgccgttttccgaccattactgccgtgctttaaatactaaccgttaccctcgagaaatctcacaccgtcctcctccgttttcaccactgaaaccaactttgccctctctctctccggcgatctccccgacgcacaaggcgatctccaggcgatttcgttcccgaccagatctccgcccgcggcgatgtcgtcttccaccagcccttctactgcgccatcggccgagtacgctgaggtaagtcctcaccagctagatcccttttcctcgcatgaaattgatttctccttttctcctcatgttttctgcttcccaattcctttagatttgttgcacctttccaacctagtcgcgattcctagcctttcacacaaaaaccactattttcttggcctaatcgacaatctcgaccacactgatttcatcatcggtgaaaccaaccggatcccctttagactagccaaccctaacctgggtcactggaagaataccttcaagtcttggccatctctcgaaaaacctactcctgataagagctggaccacctggtaccaacgcgtatcggctagtaagaaagttcactgcgatgaaattggaatcggccaagcacttgctctcaccatagccaattctgctaaggatgaacctttgatggctgccgccacctacttttggtccaacaccatcaatgctttcttattcaaccaagggccgatgactccaactttaatcgacatcaccatgattaccggattagatgtaacttcatcggctaaccctatgagtatgaacaccaagaaccaatttgacttcaagaccaaaagcataggtggctggtctggctatgtggcggcatatatgggccaagggtctgttacccctcgagagcatgtagctttcttgctcatggctggaaaagttcctcttcagtggatccagttgtggccctacaaccaactggcaatttgtagccgaagccttagaatcaaagaaagaatttcctttgggcaaaatccttctcggctatctgtaccagatgttgaacaatgcattggctaaaatagccgttggctcaatagttggagcaggtggaccatggtggctgctgcaaacttggttaaacctgatagtcatgaaggttgtcaatcggccctctgtgacagaagctgaattcccattgccagagccgattgtggaagatgacggagaagagcgcacccatcgcagatgcatgtcatatggagaatatgcatccacaccaaccgatgctggagcgaagctatcggctgagctactcaaggactggttctgcagcttctacgaaggttttaagaaagatgcacaaatctggtttccttatgaagactcagcagaccttgaacttccatcagactttagatttgaagacattaatcatgaaaaattccaaaaatccagagaaattcttatagctgcaatcagcccatgcatcctccctgtcggcattcaccaagggagaaacatccaagtctcatacgagttttatcacctaatgagctcggccagacaacttggattgggccaactcccaatcggcttattctttgccgacaagattcagtgcccaggacaaatcacatccactctaatgatggatcggctacttaacctactaggaccccctttgggcagcattaataatattgagttggcaggatttagaagcaaaaagtttgacagatggtggggtgaatggaagctgcatctatttcatcaatcgacttcaatgtatatgacagatctattccctgacgtcataccccaggtaaactttgtcattactaaattgcataaccagttagccgattcattacttgactaatctcttgctcctgttttgcagacaacagagtcctcccctcctcatcaaagtaacagtggcaagaacattgaatatgcttcaggtctaattccgaatggaggtggactatctcccccttttatcggctaccatgcccccaagacttcaactctccttcatggcctaactagggaaccagccgatgcaggcaagaaaaggaaaaccagatcatcaaccatgagtaccttagccttggctccaaagaaaaaaaccaaattcaagaaaactcaaccacaaccaactgatatgccgactgatgatctacctgccttggatccatctattgaacaagctttagatgaagaggaaattggtgaagatgttgaccaagctatagccgaaatgagtgacacagaaagaacaccatcggcttcacccaagcaaacgcctccaactccttctgcccccgttcattttacaagagtaagtacctctctctgacttcttctgaaattacctccctcttcggctaattacccatagactttgtagttgcagaagaagaaaactgctgtgaagaaaaaaccagcagcaacaattgttaaatcggctccaccagtaagatgtccttaattcttttacttaatcaatctcaaccgattctatataacacttgtctatttcgcagcctcctcctccttctcctcctgtacagcaatcatcaagtgatcagactccatcggctgtggggagtcatcacgtcgaagaggaagaacaaccagctgctcctgctatcccagtaagtttccctttgtctccacaattagattggctataatttacccagctcttattctttccgaaattgtctctgcatgctctagccgatctcttctcttttgacatcagagattaccttgatgaggcagaagaagacacttcaagcaaagccctagctcccctatccgatgatgtgagaaaaacacttgaagacatctctcatcggctagaagcctcttctttagacagtttggtagttgactgtgggtcaattaggacacagatgcatgaagttcaatctctgattcccgaagatttggctgatgtcctaactccagccgcttatctcgagcaacatcagttcaagctggaaaaagccaagctaagactagccgaacgccgtgagcgcaaagagattgaggccacaatccaagctaatcggcagcttgtgcatgaagaaaaaaccaaacttgatcagctatctgaaggtccgatcaaatccaatattgatcggctcgaagctcgcaagattgagctcttggcgcaacttgaagaatgcaatgccgagctagatatggaacacaaaaagctagccgatctcccaaaattaattgaagaacaaaaagcaaggctcaaatcggctatcaagaatgttgctgacctaaccaagtccctgaaagtcatctctggaactgatgctcaagatgtccaaactattgaagaagtagaacaaattaggcaaagggctattttggctatccagcgatacttgtctcaataacttttgtgtaataggactcagaaattttttgtaatcagctaagatgctctagtactttactgtcttgataatcctttgtgccgattaattatgactttgaaattcgctcaaaaaatttgcattgcattttgatatatatgtgcccccctaattttacaatgacaaaagcattgataaaattataaaacaattaagggcgatataacaatatcggccattgtacctcggcaaaccacaaccgattacaccatgaaaaacaactatgggcgatataaccatatcggccattgtacatcgacaaaccacaaccgattacaccatgaaaaacaactaagggcgatataaccatatcggccatctcaaggcgatgcaaacacatcggctgtcatgcatcggcaatactagccgatcatgcgttaacccaaacacttgggtaatatttcttcaaatacttgccattgagcgctcgcccatagacttcaccatcaagcccttgcaacagatatgctcccttagacacaaccttataaatttggaatggtccttcccaattcggcgaccacttgccgaatttactatcacgagtaccaatcggcaaaatcaatttccatacatgttctccttccgaaaaatctttaggtaccactttcttattataatccgagcaatacgttccttatccttggtaacctttgcaagggctcgcaatcgtgactgaaccagatcctccctctcatcggccataaggttgtaatactcatcagctattaaatcgttttgtaattctgttcttcgagagccgattctaacctcccatggcaaaacagcctcatgcccataaacaagtttgtaaggagggacttggatcgatccatgacaagccatcctataagaccacaacgcttcggccaaccgagtatgccattgccgaggataatcagaaattttccgattaatcaatttgatcaaacttttattagacgcctctgcttgcccattatcttgtgcataataaggtgaagaattcaataatttgatacccatgctatcggcaaactgaacaaattcgtcagacacgaagattgacccctgatcagttgtaatcgtttgaggaataccaaatcggtagattatatattcttgaacgaattgaattgcatccccataatcaactttcttcaaaggaatcacctccacccacttggtgaaataatcagtcgccaccaatataaacttatgtcctttactcgatggtgggtttatcataccgatcatatcaattctccaacctctgaatggccatggcttaataataggattcatagccgatgccggagctcgttgaattgccccaaacttctgacaatcttgacactccctataatatgtgaaacaatcctccagcattgtcggccaaaaataccctgcacaccgaagtaaccacttcatcttatgagccgattgatgagtaccacaaattcctttatgaacttcgccgattgcaactttagcctgatcggcactcaaacatttaagtaacactccatcaatcgtccgataataaagctcatcatccaacagagtatactttaatatacttatatatcaattttctagaagccgattaagatggattatgcaaatactgatgcacatcatacctccaatcatcggctgtcattgctgcaatttcaaccttaacatctttgatcatcggcttataccccgatgccccttgggccaaatcattagcttcaatattttgttctcgagagacatgctttaaagtaaccagccgaaactccttcattagttcttggcacttctcattataaaccatcaatgtatcattcttgcattcatactctcctaccaattgactgattactagcaaagaatcccccatgatttcaatggtatcgacttcaacttccttgagtaattgcaaccctttgagcactgcctcatactcagcttgattattagtcgcatacggtttaatagtataagcaaactcgaaacatgcccccctaggggaaattataactaggctgataccacaaccatgagtacacaccgatccatcaaagaataaagtccatggcattatttcaaccgagccgattgaatcatcacgatgttccacaataaaatcagctatagcctgtcccttaatcgccttcggcgactcatactgaagatcaaacttggttaaggaaaatatccactttccaacccttcctttcaatattggagccgatagcatgtacttgacaacgtcggccttgcatataacagtacactcgttggactgtagataatgcctcaaccttgtacacgaaaaatatagacacaagcataacttctccacaggggaatatctagtttcagcatccaagagccgatgactgagatagaatacaactcattccttcccttccaactcctgaatcaagactgagctgattgacttctcaccggccgataaatataacctaaacggtattcctttctgtggaggaataaaaacatgaggagagctaagatattccttaatattatccaaagccttttgctgctctgcccccaagtaaactgctgaacggctttcaatctcaacaatagtgtaaaaggttctaaccttccagacaaattagaaataaaccttctaacaaaatttatcttgccgatcatctcttgtaattctgtcttattctccggagactgaatcttcttgatcgcattaacactcctttgagttacctcgatccccctctcatgaacaagaaatcccaaaaactggccagccgatacaccaaaagcacattttgttggattcatcttcagtccatattttctggttctctcgaaaaccttcctcaaatcagctatatggtcctctatttctttagacttaacaaccacatcatcaatgtagacttcaaccaaccagccgattagatcatgatatatgtaattcatggctctttgatatgtagctccagcacttttcaagccgaaagtcatgaaaacccattcaaataagccgattgcaccaggacacctaaaagctatcttatgaatgtcttcttcggccataaaaatttgattgtatcctgcgtttccgtccataaaactcaaaatcttatgtcccgaagcagcatcaactagttgatcggctactggcattgggtattcatctttcggggtggccttattcaaatttcggaaatcaatgcataccctgaccttgccgtttttcttgataacaggaactatactagaaacccactcaacatatcggcaaggacgaataaaaccagcatcatataatcttttaatctcagccttgaccggttcaagcatgtcggctttgcatctcctcggaggttgttgatgtggcctaacccctagtttgataggtagccgatgttcaacaatcgatcagctgagtccaggcatctcgtaatatttccaagtgaagcaatctctaaactcttttaagagctctatcagcttggttctaaactctggacataagttcttactaataaatgtcggccttggccgatcgcctagacctatgtctacttcttccaaatcatcggccgacatgaaaccttgaccttgcttgtcatcgagatcatctaccgtgtccttagtgtagacatttgaaccctccacgacgccctcaaaataatagcttgggttctccatcttcaattggctgtatatcagaatcggacacttttagaaaatctccatcccagacttttccagataaacaatcaaggccatccatctcccaaagagctaaatcggcactggcaacattaactgacctgtcggctggcacgatctctatgttgtcgccttgccactgaatcaaacattgatgcatagttgaaggaatgcaagaattggcatgaatccaatcccttccaagcaacaagctgtaagaacctttcccatcgatgataaaaaacgtggtaggaatagtcttactgccgactgtcaactccacatttagaacacctttggtttctgatggattgccaccaaaatctttgagcaccatgtttgtcttgatgagatcctcggcatttctacccaacttcctgaacgtagcatagggcatcaaatttaccgcggccccaccatcaaccatcttttagacatcggcttcccattcacgtagccgtttatatacaatggtttaagatgccgattctctgtcccctcgggtttctcgaacactgcctattctggtgacaaccaacttagccgattcctcctccacctcgtcgacatcggcgtgatcgatcccgaattctgctggcagggtaaagaccatgttaaccggtgccgtcacaacactcttcccttttgccaacctctttgcctcatcggctgcaacatcatcagctacaggaacctgattcttaacacgccactcctgccttggctttgctttcttcagccgatgatttatttcttgttcaacctcctgaaggcgctccctgttactcaatctttgaacccttctcttctgattcttcttgaaaataccagaaggacaccattgattcttcctgattacattgtcctcttggccatgatcttgatttactggacccaatctttgatgaacagaaactcttgtctgccttagccgattacccctattatatgatcggcttgagttctcgacgatgtcactacacccagggcagttttcaatagatggcaacctcataccttcattccagtagaatctaaagaactcacatccccaataaggattaaaaccatcatcgtatttctcatgatgcttctcttgctgcttgtcatacttcttctgatatttgttgataatcttagccgaattcacctgaaaaccccttgcacgggccctatcggctgtctggctagctgtatgcaccatattaacaggaaaaaggttaccatcgaccttcatcggctttttggaatcatcaaacctaatcttgcctccctcaatggccacctgaatctgctgtctaaaaaccttgcaatcgttagtagaatggaacccagaattatgccatttgcaatacctctttttgcctaattcctcagccgatgggattgtatgaccagtaggaagttgaatttgcttctctcggagtagcaaatcaaagatcttgtcagctttagtaatatcaaagtcatacttctcctcttttccagaactttttacccattggcacggtatgacctttttactcctcacccactcggctgcagctatttcagaatcgtccttatcatcatccgacccatacatgtacggataagcatgattaaccttcttagagtttttcctaacttccgcggacctatgttcatgcaaggttactttctgtatcagatgtgacaagctatcaaagtcttcagacgagaatttctccctaatcggagcaatcataccctgaaaggccagatcggctaactgggcatcagttaaactcaagctaaagcatttgttcctcatctccctgaatctctgaatatactcgtgcacaggttcatcatgccgctgcttaattgctatcaagtcagataatttcatctcatgaaccccactatagaaatagctgtggaattgcttctccaaatcggcccagctattgatcgacccatacggcaaagaggaaaaccaagtaaaagccgatccagacaaagataaccggaataacctaaccttcagagcgtctacaaccgatgcttcaccacactgagctaagaatcggctaatgtgctcataagttgacacaccatcttgtcccgaaaatttggagaagtccggaactttgaaccgattgggaagaggaactctctcaaaccactcagggtaaggctgtcgatacaagcttccagtctcttttggtttaaacccaaactattccctcattacgtcagcaatcacattggcccacagtcgttgctgagctaccccttgtgactattgctgcatgggctcgaactgaccgtattgaggcgcaaactgaggttgagccaatccccctggctgatattgggcttgcggggaaggaggctgatattgataattcaagttacccccttggtaattatgaaggttcggctggatattacgtaccaaatgctcaggaacaacttgaggtattactgtgccatctgactgtacatggtgaaccaagtgttctgggacaacttgatttaaaaattgttgtacaggctgaccaccaggcgttgcaaacccggccgatgcgcctaatgaaccttggtgctggatcggctgaacgatttgttgtcttaacggcgtctgctgaatcggctggagaggctgctgcattggtggtgtttgctgaactggttgcatgacctgttgctggattagttgcacaacctgctgaattgggggtgtctgctgaatcggctgctgctgtattggatcaacaataggttgaggcggcagaaacgtggcagcaacctgatcttgggtcagccgattcgcaacctgcccgccatgctgtggctgctctctcattaacaaccgagggttcactggctggtctggtgccattgctgacagaacaggcaggggagttgacgccagtgctgtcggctgagatgttggtgcaacggagggaaccgcctaagttgatggttgaacatcggtaatcaaagaccgataatttgggaagacatctccttgcaaataaaccgggctgcagcctgatgctcagctattgaaccatcggctatggacttcaccatgtttgataaggtattgactaacaccccagattgattgatcaaagcatgatgcacagcgtagtcaacccgatcttggaaattactgaaaaaatcttgtgccgcatcactattctgattaatatttcctccttgcaacccctgggcaccatcaccttgaactccatgcaccccgtcaccttgcactccatggactccttgagaattgtcaccttgatttcctagagagctatcggtagcacttttgttactcagctgagccgagccgtctggagcttatttcccatctccatccttagaagaactggtccccggatcatcagcaaccacttttattttgtacttctgaacaaatgtccccttgcgggtttgcatgaatgagttcaagaactgatcccgtgcttgctgcaacattgcttcaaactctttcttctgcttaggtgtgaatttttctggattgatcggcacgacgtttccttcattgacgtcagtcaaccctaatttcagcatcttttccttaacagagcctgggctagctagggatggtggtagtggttgtttctcggccatgaggaagaattgttggctgacttcttaaaggtcccaccgggcatgccaaaagcgtgttgacagaaaacacgaggcctaggagatctgcttaactccagtgcaggtccaaagctcgccttcgaatgtatgagcgtgccagttgatttgatcctgtaatcaacaagaaatagaagcaaagaaaccgcagttaaatatataaatgatagccgatcggctaggtgccgatgacacatcatttatctggcagccgatgtcatatatgaatcgatcggcggttgtaaataggcaataaagaactaaatctattcgatcggctgtaaatattaacaatatatagttcctataccgatatatacttaaatcaagtgactgggatagatcggtcgccatgccgagacagtatgaatcacttagatcaatatatatattgataacagccttatatatcttaatagcatagccgatcagatagatctagcatgtatcggctaatactccgatactactctatatcaggatactaaaacaagtaaaatatatcaaacaagagcctattatacataaatgaagtaagatcttgacataaagggcagatttaatgtatcattgaagcatatagagcaaatacgattaaatcaggtaagatcggctaaaactccgacgctactctaatcagcgaccataggcaggctagagattgatattctaagcacgacttaatagatcaaactcaactgatgcagcattaagtatgaaaagaagaacaatatctagacaatcaagccgctggaagtttcatagagtggtagatatcttatataatctaggtcaacgtcgctatttaaccaaatcggctgccttctgttaacagatgttaaccgattgtaggttagatgacgatattgtcgaagattatgtaagatatatgataacttgatgaattacatagacaagattagagtatcataaagatggaagcactaatcccgagaacataattcatcataacaagttttacctcttggtgaaaatcgaaaccgatgcagctcaacccgaaagcaagaactcgtcgaaataaaactaaagcaaaaagggtagcgatgtgtcacgcccagaaattcacaagtaatttccgaactaatttgtgcattaaaaccctcgtccaggaatcagccgaggtacacaaactgacaatttaatatacagattcatcaaaataactaaaatgataaatacttacataagaggcacttagtcctcaccatgaagaaaactgcagcggaaaataaaatctagcgaagcttcagctccactcccacaggcagctcaactgggatctaaaccaaaggtcttctccttctggatccttttcttcaactgaggtttgatgattattgcaaggtgagtacatggaatactccgcaagccacacagcaagtatgcaagtgcacatggataccaaaggatggcataatatagggttcatttgcaaaagcagcatttagcaaagagttaagagtagtaaaacagtacactaattaatcatcaatattaatcaacactgaacagcacacccatgctgctcaggcccaaccaaacctgaacaaccaaccccggtcgtacagatcaaacctccaaaccaggagtcaaattaattatcacattattatcattaataagtagtctggaactaatcacgaaaaacattgttagacccgcctataaccgcgggcacagctattcgaatagttttactctggccagagatgtaccaatgtacccacaagacacgattccacacatgttaccatgccccgaagtaccaccacggcactgcaaagggggaaatcgtgacagtaccctttgcacaacacaactcaccacagtgcaccattcctggatcataatctccaactcaaaaccagagacaatggactccccagcgacccccacggacttctcgccgcttcatagtctgacaccccgtaatgaatcatgctatacaaaagataaagccgttgcccacgctggcttgtggttggcatggttaatgtttcacaacagtagctcgcgaaccggtccttaattatcatgagcacgaccctcaaaaccatgtgctcacaacccaccattaatcatattttaattatcaattaattatcataacacgattgaccatcgtgagctaccattaaatataaccataagtaatagtgaagcataatttatctcattaatgagctaatgtttctaagcacggctaagcaactataaataacatctaactgaatcaatccaatatataaggtccatgctagtcaaattataacccataggaaaataaagtcatcttcggccagaattaaatgggaaaggctcaccacccaatgacattcgaaaataatgcataagttgaaataaaatattagctttaaacgggttcaacatgtacaaagggttgtttgggatctgtgtgacttgccttgagcttccgcaaacgcttctgaaccttcctcaacgtaaacgctctcctccagaacgtcggaaactaaagtaaatgaacaaaatcaacaaaacagtacaaaacaagcataaacagtacatgtggatacttttaacatgtaaatctcgattttagatgaatttagcaactttaaccactcgaatccgagttacgatgattttgttatgaatttccgaagtttaatcgattttcagctaacagagaaaactaaaaaaagatttatgacgtcatcgctgacatcatcgccggccatggcacggctccacgcgaccaccggcaaaagggagctcggttggactatccgaggacacctacgcgaagaggacgacgacgcgaactcaccggtgcaagaaataatgacggacgacgacgtatagcggccggcaacgagctccgacaacggcgcggctcggctcgacggcggcggtggcgctccggcagcttgcgacggcggctaaggggcggccgaggtactcctcctccgtgcacacccgacggcggcgacgggaagcggcgacgacggctacagttgcggcgcggcgcggctggaaggcgtcggcgacgtcggcggctagggctacgcggcggcggcgctacggacgatggctcggcttgggacttgaggcaaacggaagaggacggctaggggatgctatttatagccggaagagggagagatcggctcgggaacggatggaatcggcgacggattagtttgggttcgccggaaaataggaactcaaaaccgcgtcgaatccacacgatataccacgagactcaagggggtttcttggggataagatagaggagatcgagaggaatccattcccacaactaatttggaaagaggagcaacggagaggacgaatttggtggggaggcggcgctgtacacgggcacggcagggaggagatcgaccggctggaggttaggggcgacactgtagtagagggagacaagacagacttcttgccgggcttcatttcctcggcccaatgaaggagggaagcaaatagaacttcggcagagagaggaagagaggatgcaggctcgggttgggccggcggaagagagaggaagaaagcgaatgggccggattcggcccgagacaaagaagaggattttaattgactttttaatttaaataattgctgaaataatgttccatttattaaaaatacttccaatgctcaaataaatccaagaaaaattctgaaaatacttgggcacacaaagtatttgatgaaattttatctagctcatgtttaagttcaaatttttcatagattttattcacacactttctttaattattaaataatttctaaaaaattcctttttcacaatgatttataatttagcgatttttagggtgtgacacgatgcgccgagattgtattaaacgtgtgtgttaaaagttacatagggctcgggtctatttatacccgagaattacaagatatatccataacggacacgactactatctctaacaaactctaagataccataagtctttgcggcagatttttgcccaaacatatatctaaggtaattacataaaacatcctaattactagatacaattgccttctcaggactctatccatgtgcggcaatcaccttgaagcgcctcaattcaacccgatatcatacatcaagttgcatcgtcggaatcggctgcatcggcttacctagcccgactcagacccagccgatcctactcgtagccgatctggactccagccgattcctactctgtttccaaactcgatctccgcctccgactttgcttcgatctaatcttctttcccgatgccaatattaccaaatttggttgctaacacatctgtgttgacgaaaaaaaaatcgaacacacatcggatgatataaaggcaatcggctgatgatgatgcaataaaataacaatataatccagtataaaccaatcggctagcaatgatatgataaataagcatcgatccgaaggttaaagcacacatcggctggaggtccggtgtcatgaaatccacaagattagattaaacagtgaaacctttgttgtcatcggcgaaatgcaacttatatgtatgtgcaatccttatgagccgatgcaacgtccagataactcaccggctgaaacctcgatgaaacccttgttgtcaatcaagaagcaggctagagattatggttctaagcacgacttagtagatcaaacttaactgatgcagcactaagtatgaaaagaaacataatatctagacaatcaagccgttgactgagttttagggtggtagatgtctgagctaatctaatctagcaacgcgatttagccgatatcggcagaaaccctaaaacgagaagcagccgatatagctaaattgatatgctaggactagattaatagagacatatgataaataggtaggcaaatatatcatccaaactagagcaatccaagaggtcgaatgtactgatgcagccttgaacgacgccgatgtagatgagacaattgcctgggccgacggaacattggacttatcccttcgccggagatcgaagacgacgcagccccgcgtcgggtgccaagttccgccggaacgtaaaaaacaaaagtagaagtaaaaaaggtggcgatgtgccgaattgtattgatcgtagagataaattacatagacatcgggtgtacatatttatacccatgggttgatacaagtccttgtcggacaagaaagaaactaacctaaagataaaagaaaaatataaagtccttatcggacactaaacatactttcctaaagataaaaggaaactaacaaactattcctaattaatagataaactgccatgccacatcctttttaaactcggtcacttagggataagcttcctttagtagattgatttccttaaccaaatatagcaggaatccgactattggtgacttgataactcccatcggctgattccgagatgctgtagccgataatgattctaagccgatgacgtctttaccaattacaaaatttcactgttaacaacgacatctaaagattacggtatttgttagtagacatcgtaaaaacgagattttgcttttagtatcccagaaacttggtaattagctactggacattaccagcaacaaaataatatatacagccaggagaggagagacatgttgtgtgaaatgtcatttatacccttttcttcttgtaccattatcttcaagttcctcttctgttcttccactgagcatcaagcagtactccacggccctcttccaggaaattgtcaaacattctcggtgagcatcggccaccacacacacgcgacgagctgtaccttatctctccctagctagctggccatagcaagagccgtaaactaccttgctgttgcagtgttgcttgccatagagagcctctactatacaagagcttcatcatcaagaaccgccgccgacgctactgcttctccagctccgaccgtgccgacgccgacgccgactccaccgccttctcctccactcccgcctcacgtgccctgctgcaagaacgtcggggagatcggacaccgatggtgatgacgagacaatgttgttggcgacgaacatcaccgtccgggtgcgggtacatcaccgtcgtgttctgccggacgggtcggccgcgttgagcactagctgccgcgccgggagggagttgttgtgtcgccgccattgtcccatatcactggaatggaaggatgaaagagaaggggatggttatttggggattttgactggttgactgattttgagtgaaaaaatgactgacagtcacccaccgcccaccggggaaaccgaaataggggtgcgtttagttcacgctaaaatagaaagtctggttgaaattaaaacgatgtgacagaaaacttgaaagtttatgtgtataggaaaattttgatgtgatggaaaagttgaaagtttgaagaaaaaatttagaactaaactcggcctagactagggtattttggttttttcaaaatgattctctctccgaataggcaagaaataataaaataatcgatgcaatgtatagcaacaaattactacaatgtttccaggatgtccaaaagcaaaaccttgtttttatcatatctagcagcaaagaccataatatttaaatgtcatttagcaaattttgtcttttaagtacattcatgccattgttttttgtgcgggacgatatttactatagatatctcaaatagagcgagtagaatggctgaggctaggccggcgagcagtggcaaatacataactaaacttaaagttaaagaacggttagtgggatccaaaagttgaataaaactatatatcaaaataaaaactagtttacccctttatccaaaattagatatgaacaagatagtggagttaaaacttgtctttgtaatatatttgaggatatccgcttcctatttcaacgatcttgctatgagtagggtttacaaaaccgtgcattatcccagttatcacgtacggtaaacttagtttttaaaaccactatgaacccgtgttaaccacatggttttcacggtaacatgttgttatcgcgataaccgtcttatcatcgggtgatggtacacccatccaaaacgccttggtgaaccccggctatgagccaggctgaggcttgctaggagagcttctcacgttagagccacacaatcaccaatgcaggtcagggcttcctcgatgaaacaaacatgtgaagaacagcgaaacaaaagacaagtaggaatcattaagtgatagccttggcccttgaccgagtacgtaactactagctaggtgactgtccatatatgcaagaatgcatgaccacctagcaaatatatgcaagaatgcatgaccacctagcaaattaaacgcggttggctcggaagaattgcatgatgatccattcttgcggagtgctataaattgaatggtatagatagatgaaaacaaaataagagttatatggttagcactttaaaattatggtatgactgttgtgagataatggagtgaaatgagataatggagtgaaacaaatcttactatagacgcagcttgtgtgccgtgcttcatatgctctcttctttaatagtcctcatttgggtattggtccgttctgtcatgtctattgaattatcgttgctccatggttggatgcctatccactacagttacacagttgttggcagtatctctttcctcgtattgtgcacagttgttgctagcacctccttcctcatatttaataggagaacattgtcataaccaaaacataaaattgatagcggttgtttcataagaccgaatgtaatctccgaattgtattatgatttatgaaatgacggcttttattttaataatatttttatttttaattttaatttttttctttgcatcttaatctttcatattttgttgaaatctatgccgcgggggttaatttgttgagttttcatgaaataaaatacttaggctattgctttattggaagaaattaaattaatgcaactgagggtacatataacatttcccctaaccctaaaaatgtggttacatgcatattaacattggtaattttcacaatggtctatagaggtagcataatgaatctaagcatttgtcttattttatttaatggtaatgtctattcatactatatgttaaattaattgtggtagatttttctacttatagtataaatcgatgatttagattgttctactaataataagactagtactagaattctagtaccagtagagatcagggtttatcttaatagtaaataccgcagtagccgtacatcccatagcggttcgttagcaaaaacaactagtaagtttcatatgatgtaaagtttgttattgttgataataatttataaaagaactaaatggttaaattacgatattcaagatcgattttacatattattctatatccatcctaaaataagtaaaacctatagtgttacttgtaaattgtcccattaataataactcattcaaatttcctctaattttacccccaactatcttcacactttcaaccacccccatttgatagggaacagctagttgattttccctcgttgttaatttatccttctactcataaaactatagttattttagaactaaggtaattttttagaatggagtaaagtgtttcgttgttttgtcgtcatcgtccatctcctctctctctgttttccttctctggagatcacatatatgttcccagatatagtgtcagtcccggtccttcattagttatttcccacacagatgatcaagtagcacatgtacgacgcgaaatataaatagatgtattttttttgtaattctacatcacatggaaatatcgatcaactatttgcattggagaaatgtataggttggataaaagaatatacgaagaacgtcaggaaacaaaattattcaacgacatgatccaaaaggtccccaagtacttgttcgaggtcggccatggcctggaggactccggcaagccgttcatctgggtggtgaaggtgtcggaggtggccacgccggaggtgcaagaatggctgtccgcgctggaggcgcgcgtggcggggcgcggcgtcgtggtccgcgggtgggcgccgcagctcgccatcctgtcgcaccgcgccgtcggtggcttcgtcacccattgtggctgtaactcgattctggaggacatcacccatggcgtgccggtcgtaacgtggccgcacatctccgaccagttcctaaacgagcggctcgccgtcgacgtgctcggcgtcggcgtgccggtcggcgccacggtgtccatgatgctgtactatatttccaattattactattatattgtggttgtatattggacattgtttgtttctttaacttcgacggatgtgaatttcataaattttgagtggcttattcttatttccaacaattttgctagttaactaattaattagtgatatatgccacataatttttaatttttaaaatagcttaaatttctgggttgtttcaagttacaagtagcactataggattttacttattttgggacaaaatttagatcgagaactgcacttattttacgactgatatatcataagacataaaatcgatcttgaatatcacaatttaaccatttatttattttataaattattatcaacaacaacaaactttagatcatatgaaactcaatagttgtttttgctaccaaaccgctataggaagcacgactgcctgtggtaactgctgttaagataaacccttatctctaccggtacttgggaagtacgactggccggtacttgggaagtacgactgcatgtggtaactgctattaagataaacccttatctctaccggtattagtagtattctaggtactggtagtattctagtactaggcttattattagtagaacaatctaaatcatcgatttatactataagtaaaaaaatctaccgacattatcattagataaaataatacaaacgcttagattcgttgtgctacccctagagaccattgtgaaaattacaagttaatatgcatgtaaccacatttttaggaataggggaaatgttatatgtataagtagaattcatgttaacatcaattgcatttgttccaatgaagcgagagcctaatattttattttaggaaaactcaacaaattaacccttgcagcatagatcttaacaaaagataaaagatttatgatgcaaagaacaaaaaaaaataaaaatcacaattaaaaatatagtaaaataaaaaccgtaatttcataaatcataatacaactcggagattaccatcggttttatggaacaaacgctatcaattatatggttttggttatggcaatgttctcctattaaatatggaagattaacaaatactatgagcggtgatggtaacaactaggcacaactaaagtgtatgcgcatccaaccatggagaaacaataacagagcaatacccagttgatagatggtgtaaggagtgttaaagaagagagtatatggaacacgacacaccggctacgtccattgtaagatttgtttcgctccactatctcacaacaattctaccttaattttaaagtgctaaccatacaaatcttgtctttgttttaattcatctaaaccattcaatttatagtactctgtaagaatgaatgacatgaaattattcatccgattcttccgagctacccacgtttaatttgttaggtggtcatgcgttctttcacatatggacagtcacctagctagtagttaccctggcaagggccaattctatcacttattggctctacttgtcttcattccactgttcttcatgtgtttgtttcatcgaggaagcatacatgcatacatcacgtgtgagtcggatgagtaacccctgaccagcaatgatgattgtgtggctctaagagcaagtttaatagtaatcatctatagttaatttaatagccaattcatacaatagttacctataaaaatatactacataattaatgtttggtcccacatgtcatacacatgtgcatcttagagtccgtgctacaactggctataaatatgtagcccggtgctcttctctctcgtcttttatctcctcgaaatatgtttatagctggcttatagtctgctattgtatcttctctaacgtgaggctctccaagcaagcctcagcctggctcatagccaggattcaccaaaccgttttggatggggttaccatcacccatggtgagacaattatcacgataacaacatggttaccgtgaaaactgtgcggttaccacgaggtttacagtgattcaaaaactaaaaagattaccgtatgtgataacagtgataatcgcatgattttgtaaaccctattcatagccagattagttaaaaagtacgatgcaaatatcctcaaagatatttgaacagactgaatttaatactaaaatttattgtctctaaattttaagggccctgtattgtcagatactctctacagatgctaatacacggccctggaaggccaagccaagcctgagttgcagcccatgcatagtaagccatttctttaatctcttgtcttttacttctattttacataattacaaattcatttttcaatctactatcttgttcatatctaattttagataaaagggtaaactagttttcattttgatggatagttttattcaacttttggatcccactaacagttcttcactttaagtttagttctgtatttgccactgctcaccggcccagcctcagccattgtactcgccccatttaacatatctatagcatatcgtcccggccgtaccgaaaacaatgtcatggttgtacttaaaagcctgccaaaatagtggtgtgatgaaaggttattttagaagtaacattattaatagtctattgttagaatattattaaacatgtttagaaatatgtctttttattattaaatgtacaaaaaatgatggatatatagatttatgtactttttttaaccaaaggtagtgggggaggcccccacggtatattaattttccagtagtatgtacaaagaaggaaaaagataaacaatgaaggaaaaaaaacatctaagttacagctgatctatccatgattgaactaggggcctgtaacattctttgagcctaattaaatgtaagctcaaatctaacttcaagttcatcaaccagttttgcactgagggctggatgccttagaagataagtccatttctctccttacagatattccatgaggcaattaagaatagatccataaagcaagaatgcaagacagccactttttgagcctggatcctttgatgaaaatccaagttagggttccatgtccatcccagacaattccaacaagccgcactaaaaggacaaaggaagaacaggagatctctagtttctctggcattagctgagcaagagagacaaaggactgaagtattgggtggcgcgcagtgctttctatcaaggagatcccttgtattaaccctgtccatgaagaagagccattcaaagaccttaattttcatattgactttggactgtcatatccatttgatagtaggtgggggagtgagagccagaaaactgagcttgtaacagagtcgcgaagtgaatttccctgatccccaaacaaatgtccatgaatcatcaacctcctgaagggtaaaggattggagattttcttgcatgtccttatattcatcaaacgcttgctgcgaaaggggaaggaaaaattgatcttggggacctctagctaagtgttgtgcaatataatcattcctatgctttgcgaaggagtataaatggggatatttgttgatagaatcatgtactttttatttttagtacctcatcatagctggacatatgttgataattttcctacttttagcatataataataataataataataataataataataataataataataataataataataataataataataataataataataataataataataataataataataataataataataataataatataagagtagagctttttttttttgataatgagagaagattagagagatacggtaatacatagataagatagatgatgcaatagtgtcaccaaagcttctagagagaaacaaaagacatcagcggaccacctcgatggctaaaaacctttcttcatccaattaatctgctcgggctactatagctcgtgttcatgtttggcagtgttcgttgccacgtttcgatgtagcgatcatgtgtggaaaatatcatgccacgccataaatagtgatgtggttgtactcaaacgtacatcaaaattgtggtgcaaccgaaggttatttcgataaataacttaactaagcgtcaattgttagaatgttactaaatatgctgatgaaaatagaaaaataatgttggttaattgtatagcttttacttataacacagcaacccaaaaccaaaaggatgtacatagccaaacagtagctagacaaaggcaggtatgtttttcgtagttagcaataataatactccaagattagaagagatatcgagatagttataatcacaaaagcttctagaatggcgcaaaaaagaaaaaaagagctggaccgctttgatggctataaatcactctctatgctgtatccaatctcccacatcacccacactatcaaagctttttggctgccactcgcaccgctctcgtgcccaccatggcgcccacgccggactccgtttctgctacgtcaccgccgccgccgctgccaccgccgcattttgtcatcgtcccctttccggcgcaaggccacacaatccccatggtcgacctcgcgcgcctcctcgcggagcgcggcgcccgcgccagcctcgtcgtcacgcccgtgaacgccgcgcacctacgcggcgtcgccgaccacgccgcgcgcgccaagctgccgctcgagatagtggaggtgtcgttctcgccgtcggccgccgacgccggcctgccgccgggcgtcgagaacgtcgaccagatcaccgactacgcccacttccgcccgttcttcgacgtcatgcgccacctcgccgcgccgctcgaggcgtacctgcgcgcgctgccggtgccgccgagctgcgtcatctccgactggtccaacccgtggacggccggcgtggcgagccgcgtcggcgtcccgcggctgttcttccatggcccgtcgtgcttctactccctctgcgacctcaacgccgccgctcacgggctgcagcagcagggcgacgacgacaggtacgtcgtgccgggcatgccggtgcgcgtggaggtcaccaaggacacgcagccaggattcttcaactcgccaggattcttcaactcaccatggaagccatgcgcacggccgacggcgcggtggtgaacacgttcaaggacctcgaggacgagttcatcgcgtgctacgaggccgcgctcggcaagccggtgtggacgctcgggccgttctgcctctacaatcgggacgccgacgccatggcgtcgcgcgggaacacgctcgacgtcgcccagagcgcgatcaccacgtggctcgacggcatggacaccgactccgtcacctacgtcaactttggcagcctcgcttgcaaggtccccaagtacttgttcgaggtcggccatggcctggaggactccggcaagccgttcatctgtgtggtgaaggagtcggaggtggccacgccggaggtgcaagaatggctgtccgcgctggaggcgcgagtggcggggcgcggcgtcgtggtccgcgggtgggcgccgcagctcgccatcctgtcgcaccgcgccgtcggtggcttcgtcacccactgcagctggaactcgattttggagtccatcgcccatggaacatctggatcctccataccgccgacggccgttctgcctcttgctcggccgcgcctccactctcccctcctccgtcgtctgcatggtcctcttctccttctgcgcccaggcagcctgcggcaccatcttcggcgtcatccccttcgtctcccgccgctcgctcggcatcatctccggcatgaccggcgccggcgtcaacttcggtgccgggctcacgcagctatagttcttcacgtcgtcgaggtactccacgggcacggggcaggagtacatgggcatcatgatcatggcgtgcacgctgccgtgtccgtgaagctccacgtcatcgaggtactccacgggcacggcgctaccagtaccagctcgttggcgccggcgagcgccgccgacagcccacgcccaccgcccgtcctcgccgtgcgcactgcgcgagagagagaagacagagaaggaagagcggaagaagagcatgacaggtgggtcccacccttttttattaaataaaatgctgactagattgccacgcgtgtgccacgttggataaaaccgctctggattaggtcgaggtgggtaatttgtccggtattgaaagttcaaggtggacgatgacaggttttcgggtttatggggtaatttggaggaccgcgatagttcgagggggtaattcgcactttttccttacataaaaataaaatagaagtaaaggacaagatattaaagaaatggcttaccatacatgggctgcaactcaggcttggcttggtgccctggccttccagcgccgtgtattaacatcagtagagagtatctgaccatacagggcctttaaaatttagagacaataaattttagttttaaattcagtctgttctaatatctttgaggataattgcgttctactacctccgtcctaaaatataacaacttttggctataaatttagacatacagttgtccagattcatagccaaaatgcttatattttgggatggagggagtactttttaactgatcttgctatgaatagggtttacaaaatcgtgtgattatcactattatcacgtccagcaattttcttagtttttaatcactataaaccttgtggtaaccgcacggttttcatagtaaccacgctgttatcgtgataaccgtctcactgtgaggtgatggtaaccacatccaaaacgatttagggcttgtttagttggcaaaaaattgtgcccctgcatatcacatcggatatacggacacatatttgaagtattaaatatattcaaataacaaaacaaattacagattctgccaagaaactacgagatgaatttattaagcctaattaatccatcattagcaaatgtttactgtagcaccacattgtcaaatcatagcgcaattagggttaaaagaattgtctcgcaatttcctggctaactgtgtaattggttttttttctacatttaatactgcatgcatgtgtccaaacatttaatgtgatggcatgaaaaattttatttggaaactaaacaggcccttggtgaaccctggctatgagtcgggctaaggctagctaggagagcctctcacgttagagccacacaatcatcattgtaggtcaggggttcctcatccaactcacacgtgatgtatgcatgtatgcttcctcgatgaaacaaacacatgaagaacagcggaataaagacaaagtaggaactaataagtgatagccttggcccttgaccgggtaactacttgctaggtgactccatgtatgcaagaatgcatgaccacctaccaaattaaacgcgggtggctcggaagaattggatgaagaatttcatgtcattcattgcggagtactatataaattgaagggtatagatggatgaaaaaaaacaggatttgtatggttaattagcactttgaaattaaggtaggactgttgtgagatagtggagatagaactgttgtgagatagtggagcgaaacaaatcttacgctagatgtagacatgtgtgttgtgctccatatgctctcttctttaatactccttacaccatctagcagctgggttctgctttgttatttaataggagaatactatcacaccgaaaactatataatcgatagtaactggcttggcctgttgattcttcatgtgatcgggatcttttctcttggagaaaatggcatatctattccttgcttcttgatagtttagtttctctttaagattgtcgcgtcttagttttattggtcccgaattttggaggttttgatctggaaggactgttttgatttgttccccaatggatgctaattgttgttgtgttcatggcaatggcgttgttcagttggctgtagcattggcgttgctgaccgttgttgagttggtccatggcggcagcgatgggtggcgatgggcaccgggttgcgcccgtcaccaagttcggcgatggcaacacgctcaacaccctgccatttcagaacgccgtcttctacgtccggtagttcaccaacaagggcggcgcgcagctctacgtgcccaagggacggagggtttactctatatgctctcttcttaaatactccttaccccatctagctcagctgggtcttctacgtccggtagttcgccaacaagggcggcgcgcagctctatgtgcccaagggacggcggggttgctccatatgctctcttcttaaatactccttacaccatctagctcagctgggttttggtttatttctctatggttggatgcccatgcacttcactttagttgtgcatagttgttaccattacttccgtcctcgttactttatttctcatagtatttgttgatcttccatatttaataggagaacactatcacaaccaaaactatataatcgatagcggttgtcgcataagaccgacggtaatctccgagttgtattatgatttatgaaattgaggcttttattttactaatatttttaattatgattttattttatttgttctccgcatcttaaatctttttctttttgttaaaatctatgctacgagggttaatttgttgggttttcctaatctataggctctcgcttcaatggaacaaatgcaactgaagttaacatgaattccacttatacatataacctttccctttttcctaaaaatgtggttacatgcatattaacatggtaattttcatgatggtctatagaggtagcacaatttatgtaagcatttgtcttattttatctaatgaataatttctatttatactatagcttcaattagttgtggtagattttttttacttgtagtataaatcgatgatttagattgttctactaataataagactagtactataatactagtactggtagagatcagggtttatcttaatggtggataccggagcagccgtgcttcccatagcggttcggtagcaaaatcaactggtaagtttcatatgatgtaaagtttgttgttgtggataataatttataaaagaaataaatggttaaattacgatattcaagatcgattttacgtcttattctatatccgtcctaaaaagtgcaattctcgattttaattttgtcccaaaataagtaaaacttatagtgctacttgttacttgtcccattaataacaactaatttaaatgttctctaatttacacccaactatcttcacactttcaaccaccccccaattgatagggaacagctagatgattttccctcgttgttaatttatccttctactcataaaactgtatttattctaggactgaggtaattttttagcatggagtaaagtgttacgttcttttgtccgtcatcgtcaatctcctctatttttttccttctctgaagatcgcgtatatgttgccagagatggtgtcagtcccggtcctccattcgttgtttcccacacgcatgatcacgtagcaccggtacgacgcgaaatataaatatatgtattttctgtaattctatgtaagtgatgtatcacatagaaatgttgatcgactatttgcattggagaagtgtataggctggataaaagaatatacaaagaacgccaggaaacaaaattacgacatctgaaacaaactgtgttctaggtttcaaccacacggttggatcttcagatttgactacgcgacctctgtaactcatccagacactgcattaggaaggcaagatgaaaacgaatagtgcaaaaatcaacctgtcgtagtccacaattatgccaatcaacatctggtctcaagacgttcagatgtggctagctgcagctgaactgctcgattaattggtactgatactgtccgctccatgaggaagaaagcacaagccaagaaacacacccaagcaagcaggcatgcaccgtcaatcaattttcactttttgattctgctccaatgaaaaatacagtctgaagattgaaggagggaatggcctctgcagccatcacaagctgcgtttttctcttttcagtaatggagctacagtctcatgaatcctgacctctctaaccatcacaagataatgattggtgataaactcttgtgcatccaaaatatctcatactactaaattacattttgggacaaatatttgcaactatgaaattagtatacttgcatactgcaattcataacgtatggtacaaattttgcaagagaatcaaatgtttcatttaatcaaatggcactcctaccttctcattataaaaaactgagtatttttttattaatggaaatttttaaaatctacatgtgcgaattagaccctttttctgatcgaaaatgtggagagcgagaaaagggcttcagagatctaattgtaccgacttagcatctagcctgcaacacaataatcaatctagtttttcattattattttttttgagaaacggtaatcaatctagttttaatcctagagtatctaaagtagtgaaaaaagtaaagtttttcaccaccagaatgtgccacgtcatcggattaaaaatgaccgtcggatgcaaccatgtgatcaacacggaccattggatttcgaagtaacatgagtagtcttcctgagtcttggactgaaaaggctggaagcctcgtgaatatataaagcccacgtgtccacggcccaccgcactactcccgatcggtctcacggatttacccggcaaaaaaaaaaaaaaaacacagcccacactcccaatcgcgtgtgcaccactgcctctctcgtcttcgcgctccgcccgtattgccgtcgcctccactggccaccgccgcctcctcgtttgcactgccaccctcccaccgcacctccccatccgcaccactgcttcaaatcgtttccaccgcagcgttttccgccgccgccgctgccgtgtttccccattgatccgaatcacagctgcaaagaacagaacaagatcgagatcgacgatggtggatcgaggtcaaaaatcagatcgcaaattcaagcagaagtactgcaacaagactgtcgccatctcttcctcccttgcccactgaatcccatgatcccatcccaggtatctggtaataagttacataatcaatatatcccatcccctcctatctgtcttcccacgctgtggcctaccactgcagatcggctcaaataaaagagacgatgccaaagatggagtgatgaagagcgaggcacaaatttctgtatggctacaatcatggtaaatattacttcttccgtttcgtattataagactttatagcattgcccacattcatatagatgtgctagaaatgtatagattcattaacatctatatataaatgtgggtaatggtcttataatacagaacggaggaagtacattgattttcacactgatagatgtgtcagcacactataatgaactggtgtaggatcaccataaatcgtgagtaatggtgtggaggaagcaaaggtcaatagaatgcattcgttctactatttatgcaaaacactacatctcattctttcatatataggattttgaggctttgtgagtcatatcaaggatttgtgggatttaaagatgggcctaattcttcattgttttttattttctagaataggcatcgcatctaggtaattatttgttgtgcaatggtcaaggcagaatgcaaatgttgttatatctaaaatcacttctttaagttaattagtaatgcataactacataatcatatgctttaagtagtgattccatcttcaaggccatccaacagtaaaattcaattatatactttcaggtgctattacacagaagcaagactactaaattgcaagtggcatgctattatacagtctcctttaaccaagttatatagcaaaactaacaagacgttaaactttcatttagagatcgccaaggaattatgtttgctccttgatataaaataataggtattaaaaaaatgagagaataaaaattgaaaggggacctgaggtactacacttaacgagacaattttgctctgaagcattttcagttgcgttgaattagaaaaattattagttgacaacattagatggaatctaaagaagatattttcttactgagtttacccttaaaatatttttttcttctatgttgtaactcttttgtataatctacttatgacgtctccaccttaacatctcataagagaatcagtctattcatatcttagttttgtttttgttccaaaactaaaacttcaactacacctaaatattctttcatttcagggggaagaatcatgttctttgaattgcatctgctatcaatcaacaagctagggagctcataatgttctgatgaagttactcgcagaggtggagcttaccaacttcaaagaaaagaaacatgaactagattttctgaaactattattcagggcagaaccatcacttacaaggatgagaataacctgtcatcattcgtttgctgtctaggagaaactacctgaagatttacaaagttttgctttgcttttgcaagccaagaatatttttgttgatgcgaatttcctgaaatgaatgagttgtggttgatggcaggcctacagagaagagaaaacctccttggcttgggctgaaggatttttggttggcaataatgcataaatagacaaactactgtaattgtgatcactctagattttttactatacttcataaccaaattgtacattttcattttggaatgtttattatgttatcttcttgagatactcggaggccaaatgatctttgagcaatttgtgttggtttcaaatcatggacttgattgccgtttactttgctactgtgtattgcgttaggtttgataactgtgaaccttatgcatcgtattgctgagtaaacattctcacctcttcaccgtatacggtaagaggttgatcctggacataatatttgaaccttcagttgaaatatagtttgagctgaatctatagttttaaaatcaagttgtatgattttgtaagaaaaaaaatcaaaattaagtatgattgtacattacaggcacccaaagttgtgcaacgcacgactaattggctagtgtctcatgaaaatgacaggcaaacctaaagcagagtcatacacacagagagaaaacaagcaaatggtcatcgttggtttatcagatcgatcgagatccaatacatcaccaagtgtattttcttgatgaatttaaacactgaactcacttgtttgtggcagacttgttacaccatacagatcatctgaatgtggatggcattgcaagatgatcataagtggcgaaaggtgaaatatgaaaggccacaaaggtggcaactgacaacctgatagagctagcctgatatcaacaagggttcctgaaaaaagttaaaagtttggggaaagttagaagtttggaaaaaaaattaggagtttatgtgtgtaggaaagttttggatgtgatgtgatgtgatagaaagttggaagttgggggtgaactaaacacggccaagataaaatgttcagacgaagcaacgttgaactatagggtagattgggatcctgacaaaagccaacaattccaagtcaactaggggtgtgtttagttcacgccaaaattagaagtttggttgaaattggaacgatgtgacaaaaaagttggaagtttgtgtgtgtaggaaagttttgatgtgatgaaaaagttagaagtttgatgaaataatttggaactaaacacggcctaggaatattctgatttctggaggcatgcatcttcttggattctcattggaatattccaacttccaagtccacattgtgaagaaagttgtccgcaaatagaattacatcatccattaacttcttcagaataagaaaagacaggtgacttatgtgcatggatgtccatgcatggagaaataaatcattgcaatcaaacctaatgccaacaaaatggaaaaaaaatattcaggaaaacactgcaatctgtggattcaaatgtgcctatttgcactgcactctactgttatagaacttgagttttttggttcctgcagggtgaagcggcgtatcagctgcgtcaggctttcatacgaggagccccctttctccatggctctgtgagctttctccccgtactcctttgccttcctcctcctctcgccggcctcctcgccgccgtccatgagctttgacaccgcccgcgcgacgtctgctcgccccacctgcatggcggcctcgtcgccgaacagcaacacggacgccgttgcgccgaccggcacgccgacgccgagcacgttgacggcgagccgctcgttaaggaactgatcggtgaagtgcggccacgtcaagaccggcacgccatgggcgatggactccagaatcgagttccagccgcagtgggtgacaaagccaccgacggcgcggtgcgacaggatggcgagctgcggcgcccacccgcggaccacgacgccgcgccccgccacgcgcgcctccagcgcggacagccattcttgcacctccggcatggccacctccgactccttcaccacccagatgaacggcttgccggagtcctcgaggccatggccgacctcgaacaagtacttggggaccttgcgagcgaggctgccaaagttgacgtagatgacggagtcggtgtccatggcgtcgagccacgtggtgaccacgctctgggcgacgtcgggcgtgtttccgcgcgacgccatggcgtcggcgtcccggttgtagaggcagaacggccccagcgtccacaccggcttggcgagcgccgcctcgaagcacgcgatgaactcgtcctcgaggtccaggaacgtgttcaccaccccgccgtcggccgtgcgcatggcctccatggccgcgtcccgtaggtcctcccaccctggtgtgttgaagaaccctggctgcgtgtccttggtcacctccacgcgcaccggcatgcccggcacgacgtacctgtcgtcgtcgccctgctgctgcagcccgtgcgcggcggcgttgaggtcgcagagggagtagaagcacgacgggccatggaagaacagccgcggcacgccggcgcggcgcgccacgccggccgtccacgagttggaccagtcagagatgatgcagctgggcggcgccggcagcgcgcgcaggtacgcctcgagcggcgcggcgagctcgcgcatgacgtcgaagaacggacggaagtgggcgtagtcagtgatctggtcgacgttctcgacgcccggcggcaggccggcgtcggcggccgacggcgggaacgggacctccactatctcgagcggcagctcggcgcgcgcggcgtggtcggcggcgccgcgcaggcgcgcggcgttcacgggcgtgacgacgaggctggcgcggacgccgcgctccgcgaggaggcgcgcgaggtcgaccatggggatggtgtggccctgcgccggaaaggggacgatgacgaagtgcggcggcggcggtgacgtagcagtatcgagctcagccgtgggcgccatggacaaggtgagcacgagcgtttgcagccggtgcgagcggcagccaccagccaaaagctttgatggcgtggctaacatgggacgttggatatatggagtgattacgcctaggggtgggaaaaaaaaggaccgaaccgaaagagcgaaccggaaagaccgagaccgagaccaaaaagaccgagaccgagaaatctggtcatcaattcggtcctagatagtgaaagaccgaattttgttcggtcaattcggttagtctcctcggataaccgaatagaccgaaaagaccgaattatcaaaaaatgtctaaatacaatctacaatccactatgtttaataggattaaactctaattttcacatccctacttcttctaggcatgcaacctaataagagtctttactcataaatgcttacgaatttttattgtgatttttgtgttgaaaatttccattatttctttgcatatatgaaaatattgttgaatttcagtcaggaccgagaccgagaccgaatttgtcggttctgatagtttttcacataaatttggtcttcacttttcaaagaccgaaatgaccgaaagaccgaagaccgagaccgaaattttcggttagaccgaatgcccacccctaattacgctcataggttttctagctagctccacaaggtggtgggctagacaatttagactcgaagccttaccacttttaattatttgatattaggtcattcgcgtcttttttaaaccatctagaggtctttctgctacaaaatatatatactaagttctcacgtgaatgtatattaattacctactagcttattatataaaagataaaaattaaatgtgcacctatgctggtgagaagatcgagctaagcccgacaaagctcatgagcttaggcctcggctcgttaagagctcgagcggttcgcgagtctcgagcttttttattatcctactgacaagtgcacccagaaatgtgaaatagtaataaccatgggtcgaggctgggccagtgagaatgtgagacccaccaaggcatcgaccgcacggtccgcaccattgaaacgggccactgcttgtttcttttcagaaattctttcatgttcttatttttgcagaaaaaaaaaatcatggcattccctcgttatgagttcatcactagattacacaatacctccttggaataaattacaaattctcacggtctaaaccacccctccatttgtctactcgccaactcacttcgtacgcatagattccccacgttcttttatgggttttgcattgattatttttctcggtccaatctatattagcatcaaacatgagcagtgcactgaacacccgagcaatcttgattttaaagtgattgcgaaattaatggtaccaatgaaaatctatggataacaaatgtaagtttgttttcaacttagtaatttgactttgtttaattttctgttcgcttggaatacatccccttgtttatggtagtgagaatggacgtgtacacctgcaacctgctttttgatgattaagattttcttttctagccatttttaaccatatcgctcaactcttcctgctttgagattttaattctagtacctgtgatggttttttttggaagaaatctgctaattttagacaattaaattcgttgcaagattcgtgcacaggcgcacgctggtggggtgagaatcgaccctgcaacctccctattgcagccacacataagtgacagaaaacgctctctcgttggtccttgacctctcatgaatactcattatagtaaagttcacccctttccaacccctctctctccccaccatcggctcatcgctggtgaaggttaggatagggactaggttccctgctcctctagtacttgtagtagcaatagtcgggttatcccgttggttcaggttcttctcgtggttttaattttcccttttgattctcatggtgattgttggcgtcggttggcctcgtccttgtgtctaggagcgctgtcgggcttctccacggagacgaatcactccctgttgggcttcttctcccagctgctacctaggatgcctccagatctgtgcaaagagaggtaacgtctgtctacatcgacatctccggcgaggtctttccaaggaaggcggcctcatgcttgatccttggcgacaaatcttcactaggtggctggagttttcaagttgcatcaaagatgtctcaacctcccactcgtggaggaccgaatctgtatgcctcttggcttcttatgtagctcaccgcgtttcttttgctttcttcaccaacaaaatacatctagttgttgtctttggagtagctatggtctttgtactaatttctctcaagaacaatagtagaaatctcaagtggtgttgctaaaatttcactttgctcatcaacaccttagcctccatacataggaggaatcattagggattgagtgcattcagctcacttggtttcaccctccaccggaagtgagcttcagatcttcttcatcggtgacaaaggccaagaaggagaatgactcgattgctttttttttctttctaagtccttttctacaaaatgttgagcaaaagtgtaatttgcccattcacaaggggtttttcgcaaaactggaagtgtcccagtgatccgtactgttagcactgcactgtaacaactcatcatatattatgtttctaacctatatataaaataaatgcatgagtttttctttataaaaacccacccccatcacacgagtgctccttttgccaccaagctagcgctgtgttttctcttgaactcaattttaatgctactagtcgtatatatatagtatacggtgtaactatgatgtgtttttacaccgtaattacaccgatagttttttcgcatgagatttgttgatggcactattggtagatctatgcaagaatgcataaccacatagcaaattaaatgtggtggtttacaagaattggattaatggttttcatgacacccgtgcctgcatagtcctataaattggatggtataagatgggagaaattaaaggacattatttttatggttgagctagagcaatcggaaattaagataggttgtgagatagtggagcaaaataaatcaggctaatcgggcttaagagtaggtacaatagcaggttataagccagctgtaaacatattttaagtagataaatgaggagagagaatagcagcgggctacagatttgtagctggctgtagcacggactccaagacacagtgtgtatgacaggtgggaccatgtattaatagtgtgatatgtaactattgtatgaatgagctattaaattggctatatatgaattagagttagtagttggctatattattaaacttgctctaagacgggtgcggtttgatttcgctctcttctaaacttcttacagcagccagcggttgggtattcgttatcatagccagctgtattatcattattgctccattgtggggaagcattagagattcatgtccaagcggttgggtgctgatttagagcaagtataatagtgagctataagtctactacaagcttatgtggaggagagagataacaaaaaaatcaagaatgttggctctcatgcaagagctagcttaacataagctcctagataaatatattaaatacataggttagagatagagacaggagaagatagttgtaaccaaccttatagctaatccattatatatgttggctttaagatggactaatagtaggaagtgagctctactattatccttgctcttagggcaagtactatgggcatctaagcacaagccccaagatgccacataggactaaatagtgaggtggaggagagaagaaggatgagagagaaatagtcacctctcatgcaaggggcagcccctacacaaacttcaataaatatgtgagagtgttaaagaaattggagattgtgtggtagaggtaacctattatacatatcacatcttaatttaattatatatgtcatgcataaaattagatatggtagtcacctattataaaacttgccctcactacattttcgctctcttctaaacttttttttgttaggcgcactacattatcgttgttgctccaacgtgtccatcggtgtgtcatcgcgatactatatcaatagacccatatactccctccgtcactaaatattcgacgtcgttagacttttttaaacatatttgaccgttcgtcttattaaaaaatttaaacaattattaattattttcctatcatttaattcattgttaaatatactactactactcaagttttttaataatattcacaaaagtttttgaataagatgaacggttaaacatattttaaaaagtcagcggcgtcaaacatttagggaaggagggtataagattgatattttggtcaccgagttatactactattatgatttacaaatttattgttttcattttaccagtaacttattatcgggaatttgttttctgtttttttcatatcttgtgtcgtttaacttttattaaaaatatatggttgtggatgacggatggtgcaggagttcctttgttgggggttctgttaaaaagaaatatattcatgttctagttttgtacaagtgcattaattttagattaatatggagtacatctaaaatttgtcactgtactccgttagctagtggcaggactggcagacttgctagaacctactccctccgtcaaaaaaaaaaagacaaatcctggtttctgtacccaatatttgaccgtccgtcttatttgaaaaaattatgaaaaaaattaaaaagacaagtcacgcataaaatattaattatgttttatcatctaacaacaataaaaataagaattataaaagaatttcatataagacggacagtcaaagttagacacggaaactcagggtttgccttttttttttgacggatagagtagtactacgtgcatgaattgaatgtggtcaacattaatttcaaggtgaccatttggatgaagcaatgaaggtgagacgccgtcaaggccttgtttagattaaaaaattttggccaaaaacatcacattaaatatttggacacatgcatagacactaaatgtgagaaaaaaaaactaattgcacagtttggatgtaagttgtgatacggatcttttgagtctaattacatcatgatttgacaatgtgatgctaaagtaaacatttgctaatgacggattaattaggcttaataaattcgtctcgcggtttacaggcggaatctgtaatttgttttgttattagtatatatttaatacttcaaatgtgtatccgtatacttaaaaaaatttacactcaaagaactaaacacaccccaaatccaaatagaatgacgggtgactcaattgatgtgcatgatgaattctctgcagccagcaaaaatgcatgcatctatgaaagtaaagcttattcactttgctaccatttttctaaattttagtaaggttatcaaaattttggtaagatttcatatgtacttactaaaatttagcaacaaactaaatatagccactttttcgataactttatcaaaaaaaatgtaaagttaaaaatggtagcaaagtgaacaagccttaaataactaatgccaacgaaaattactactccctcctttccttaatacaagggattttaatttgcttgcactgtttgatcactcgtcttatttaaaaaatttgtgcaaatataaaaaatgaaaagttgtgctgaaaatactttggataataaagtaagtcataaataaaataaataataataccaaaaaattttaaaataagacgaatgattaaacagtgcaattaaaatgttaaaatctcttatattagggtatggagggagtagtacaacttccccattgaaaagggcagctgtcagcgaaacccggcggttgtagcgaaaccatgcaacacacacgagcttggacgcgaaggagaagagcacaaacaatcacagtgaacacgataaacacaggatttttattttttttgcaaaatttgctataggacacgtaaaaaaacatgtaaatagttgagagacaccgaaaaaccatgatattactctagaacactacaaaatttgagtaatttgctgagggacaccgaacatattatttttatcatgtcccggttaaaagtgacagatattttttttctaaatgcccagattgcccctgcgttaccctctatactatatgttgccccagctcgacggcggcggcgctgccagcacagcagctacaaagccgctacaccgctgggtcgtgcttgaactccggcgtcttgaggtacacgtcgccgatggcacgcgccacctggacgatccccttcaccctccacgtgccgcgggcgtggaccacgacctcgccgttgtcggggtggagcgcggcgagctccctccggacctcctccgaggccacgttgtgctcagtagagagccgctcggagacggtctaatcggctgccgcgcggcggccgaggacggtgcaggagtcgccggcgttggtgacgtagagcatgttgccggagatggcgcccaggaggcagcaggagcccgaggcggccgcgcgggacatgttcggcagtgaccaccgcaacagctgctagtactcctcgtcggccgccaggaacgccttcctaatcacgtcagcgtccaccacgccgctgcacaacgccgcgaactctgttcaatttttggcgccaacaaatcaactaaagattctcagaaccttaacaaatcaaagtaaaagatggagctccgccgcgcacgcgccggcgagcgcacgcaccatggacgaaagggaagaggcgggagcgaagaaagcgggaggcgtcggggccgccatggccatcatagacgccggcaagcgtgtcgctgggtgacgccatgacctacgcctggtcctccatcaccgcgttagcatgcgccgccgaagcctcctccgccaccgtcgccgtcgcaagctagggttagggactggggatttttcgttcggtggagtgacgcgggggcaatctaggcatttcaaaaaaatatcgccactttcagccgggaaatgataaaataatgcgttcggtgtgcctcaacaaattacacaaattttgtagtatcctagggcagtgtcataattttgcggtgttcctcagctaattacacgttttttacgtgtcctgtaacaaattttgccattttttttctttgtttcttcctccttttattgcgtagagaaagtaatacgtgagcacgcaggcctaacttgcgtgtggcgagtgtatgccacttgcaacattttctctgtttcttcctccttttattgggtacagaaagtaagacgtgagcacgcggacccaacttacatgtggtgagtgtcatcccaaacatctctagggccgacatccattcttctaccttcgatgcagtgatggaaaaaaggctcaggctcatgagctcagctcgggcttggctcggctcgtaagccaaacgagacaaccccaagcctccttttcagctcgttgctgaaatgagccgagcccaagctggcttgtgagccgcttgtttcggagcctagaccaccatctttttatatcgattattttactttacggctcggctcgtttccacgcagctacctccgacttcttcactacccatagaaatggcttgccggtgtcctctaggccatggccgaccttgaacaagtacttgggcgtcttgcatgcaatgctactaaagttgacatagacgacggagttggtatttttgtggcgtcgagccacgcgggcaaccgcggtttaggcgtatacgcgcgtgatgacgccatggcgtcggcgtcacggttatagaggtagataaaagatgctttaaagaattattttaattttttattaataattaatattcaattaactatatgcttattacgtttctttttttacatgcagctaagttagccaaaaccctgaggcaactggattgacgatgaactatgaagatatctagatcaggcggtgtctaccgcaattgaagtagaaagagatggcattgaagtagcaattatgatagaagtctcgaggggaagcgtttctttgatctgatcgatcttttgttcatgaagccagaaggtaagctagctacgagtgtttcctctatccagtgagataagatgtcggcatagatggccataaggctcgagagccaggctcaaacatggcacggtatgactggtgtcgggcccatgccaacagttgggctatgcctgagccgagccttagcacggtgggccggcccagcccgacgcgatcaagaaaaatagttaagggaccaaaataaacttaattcagctataaaatgcacggcccaaagaaaagagagatacaaaatagacttatccaaccatataagacaccatccaaagagatgagagaggaaaaatagacttattctatagaaaagcacgataagttgtcgtgcctttggaccagcccggcacggcccgagtcttattggaccgtgggtgcagcccgtggacaagcacggactggccccacgtgtaggtcggaccgtgccggccgactgacctcggcccaggcctggtcgtgcatgggtcgtgccgagccaggtggcctatttggccttatagatgtcggagccaaacaaacagggcagcgcaggtgagtagtctccatccaagcagttgggtattgagtaaaaaattacaaactttttggatgccaatattcatttagtaacagcgcatgaactggcgaggtgagccgtgagcagcctttgatgttattttttttaataatgaaaatgtattacaccttcgatttttgtcataagatatataggcataagtttgttaaaaaaaaaaggtaaaggtaaaaataaaacataaggtgatgggacaaatccctaactctcctttattattgactagagttaaaccacatatattttattagctagcaattctaatgaaactaagtcacctataatagaataagagaccattagctaccgataccaaaagtatagcaccattgcacattgtatcatgcttcccctattgtagcatcgtagaccaaaaattaagacaatagaaagacatgaaaataacctgcatagggttagataattatttacaattaaaaacttgatcattacaacgacactaaattgaccgatatacatcattagctccaattataatcatcttttttatagacgtagatacccctttaagccaattaccaaaaatattttttgtgttacggggtagaggcatattaaaagaaaaaaaacacacatctccaaaaaaaactgggcaatatgacactcaaagaaaagatttggattatctcttgtgcatggcagaaggaacaatgtttgtctgcccccattttcttttagtcaggttatccttcgttagaattactttcttgtaaagaaaccatataaagtcccatagaatattcatttggatcctaacattagagactgaaaattggccataagttcttatggagctaccaacaaagcagtatttttcatttgacagttatattagctagcctaagaatcaaaccattccactcaattagctttagccaacaatggctctccaaaaaaatattcaacagcattgtggtcataacctctgcggcagtagacttcgagtcacattatataaagtagggtattgaactttgaaagtacgcaatcccaaccacgtgtctttccaaaatcttatgtttgtctcattgccacatctaaaagacccaaatattagaaattgatctttaactttaattagaccggtccaggactaaaaaaatacctgtgttgctagacatatagagagaagtttatccttcatgtatttattatttcgtaaaaagtcttgtcatacacctccaccattaaccaactagaaagtcatttgcttcacaagcatctatttttgatattaaggttatggatacctagtccaccttaattttttttgaccggcatgtgtttttccattttgttagtccatattttcttagtaatccaatctttaggtcaccttgatggtatagccggcagttatcaatgacaaatgacaaacttatcacttatgggaggtcagtatttagtaacagggcacgaactggatatgtgagcggcctccatgttatagccggcagaagacataactagacaaatcgcatcatcacccatgtccaaccgtctgtctgcatttgagagtggcacacacttcgttctacttcgtatattctagctacctgaaaaaaggttacacatcctgaaagatgtgagagttggccatagatagacatcaacgtagtgatcatgaacgttaggcacaacttagatgagcagagtagctggctggtatgctccatcaaagcatgaggttatttagttagcttcttccacaccataaaggtgaagctggagatgtaattttgatttgcagatatatctctctttgaaatcacatgtgccatatgagatatcggagaaaaacaaatagttgtggtacttatgtataacgaaattgaccgttcacattgttttgttaggttcaactactacatagtggtcagtgggtcgattgattctcttattttgatgagcttactctctaattaattttaaacttgtgaatctctctagacagttttcgctaaccattttcgcaaggagatgcacgcactatgtaactatgcaagtctatgtaatttagcttgacaatttttgagcttttttaccactggagtttaaactaaataaagtggctccactttgcttccgtgcagcattgtttgattttttttcccaatataaaatttacgttcaaattttgtatatccatattgacaacataattaatctatgttaaaaaaaacattttcaagattcttcatgaaatgtttcatgtagtttaaatctcgataattaaattagccgtaggtgcttccgacctatgaaaataatgataaaaaattaagaaaaaggtttgttagggtaatttaagaaaaagatgaggtatgaggtatagtgctatctaccgtcctaaagtataatgtttcttgcataaagaaaaaaaaagataattgtgtgtgcgttgaggggatcgggggcgacgttacgtagatagcgcgtccgatcatcgcgcgatagagagcaacgtgcgctcaggaccgagggaatcagtcctcatcgttaggtacgtgtgggcgtgggtgggcaagcccattagcgcaattctctgactcggtggcaagagatcaatctaacaccttattcatatgtgaaaaggaataaagggttttttggatgatttttttttcaacatccaaccgcctgagctgttaattataacatcaagttgacatttctgtaagtcacacactcacacttgaatctagtggcataggagaaattgggaaaaatcggattgcattttaacaattggatcatgcagtcatggccaatatatatgattgttcttcaagaaaaaaaaaactaacaacgagtattatttgcaaggttaacttttcgttatatcataatatgtttccaatgaagggcatgactagcagtaaggtactcatgcaattagcatcttactatgttattaacaataagattatgtcccacacatgcaaacagacggttggtaaataaattgcaggaaagtatatatagaatataggtgctaacacttgcagcgcttcatgactaactgtatataccaaaaatcagacgatggtgtccgaaagatcatttctcatgtgaataacaaagctatattaccgtaactataagatgtgatttcggaaccatctcctctaatcaaaatagaaaaatatatctgatctaatgggatatgtgtcatctaggtagggctgtcaaaaaaaaaagctcaaggcttgcgagcagctcaagctagactcgtcctaggctcgagctccaaacgagccaaatccgagcctgagcaaaagcctgcaagctttaccgaatagagctcgaacttctaccgaacttgactgtgtatagttcatattgtttattcttcctattaatttaataaactaatatatcaatttatattagtatatatttagacaataaattagcatgtgttagtataatatatttatcttagtccttttctactcttttattagagtgatcaaatagaaaataattatatttatccagaaatgataattaaaatatactactatattatactacttgtggccgagcacgaacaagctcgaaccgaactttcctaaaagctcgaaggtgtaataggctcggctcgagcttgtgtcgagctcgagcttgggtagacgagctcgctcgagctcgacagccctacatgcaggcgaggtgtcctcactatctcctgggaaagtattgggaaaggtgtcctttataactctttaatggaggattttggattgatagaaacacttattgtgttttagctcttggaatattttactgattttttaagttaattacttgggaacttttctattgattatagtttgatggtatgattttacaacttcttatgtttttaatgcatgatattatttctatataatagtttgttgtgaaccatgaagaataaaaatggactgattttggttgagaattatgtagactgaaatataggtagttccatgatcttatcatgaatttaaataaaatcttgaccaaagtcgtgtaggtcagttggttagattcattctttgtagattttcttaaactcgtgcatttgtttttttttataaagactataaacaaaatacatgggtggtaacagtgcgttcactcatcccattttgcaaaagaagccccacaagaatgagcaaattacaccttttatcagcattttgcagaacatgacttaaaaagagtatagaaaatgattgagtcctccttagagtgtgttcgctggaggaagttgggaacctatctcagcgcacggaaaacggagcggttcattagcacgtgataaattaagtattagctatttttttcaaaaatggattaatttgtttttttaagcaactttcatacgtttagcagtttgaaaaacgtgcgcgcggaaaacgaggaagaggggttgggaacctggaagtccgaacacacccttaggctacttgtgatgccaatgggcaatggcaaaggcttggagcttgactccaacgaagcctgaatcaaggcaagttgcataaagataagcctatgcacaaacccaaaaggggcatcccatatgcggagattcaagtgttagcacatgatgcgaagtttcagcaacaccataagatttataccaaagttcttgtatatgttcgatgtaacatcaataaatgcataagaatcggccagatctataaccccatcaaagaagatagatgaaacatggtgaactacgaaggaaaccgaggtccatttttaaatggggcctaatccttcgtgaatcttaaccacttcaaccacctattgaggaatcctccctgagatctagaagaaggctgcctctcttgcacagagctcgccgaagagatatgtgtaggccggagcaacatttccttatgcacatctagtagtaccacagttggctgctaggaaagaaatgatggcgatgctgcagctcgttagcaggaggaatcccggagactaacatcatgacagtaggacgatggcatccgaagccaacagccatctcgaagaccaaaagagtaaaatccatgggaatagcccgagaaagtaggaggacccgactaaaagtactactactagaggagccgtgaagcccaacccctctatcctccacttgcgaaaatggggaagatggcatggaagagagctgtgctaagacgggatgcgacaggattcgagagagaacgagagaaaaagcatttttttcctaggcttaaaatcggtgcgtatatctacagtcaatattgatgtgtgtgtgatgatttcatcaaccttaagatataccaactcagtctatcgaagatgccactaacatcatagggatagggggtgtgcgtgtgccgatctagcctaggtcgctaacctcataggggtagagcgtgtatatgtctttctataagtgagtgtgcacatgtctatattagcttgtgcgtttctaccatgttttaggaagaaaaagagggacatctccaactgtcctctgtctcgagccagatcaatcgaattgttcatcacccatgtttgctgcaggcccgcatctgtctctacagaaaggataaagtatgcatatataggtttgtttcttaacggtggcaagatgctaacatggccttggccaggaccagaccaggccaccctatagtcggtagaatttttgttttacaaaataaaagaagaaaacagtcgtcgtaactctagcttgcacatgaaattttatgttttcgacatgcagaaaacaagggttggtggcaggccaacagcacagatgatgcatgatggtttaatgagcagtcaagacggcatatacggcacacgagagacctgtaataagaagaaaattttgtacgtactttcgtggtaggagtgtgagagataattaccgccggccggtcccaaactcatgaacattcatgaaaaaagatggatgctgaagaaaagatcatggaaaatgtcctgaagctcactggtctgaagctcactggtctatcatgtatacgtgatgtagtcatatgcatgaatgaccaaaggcaaaacctagatgatagaatcatctcctatataaacacagtgagtctacctgcagattcacctgcaactgtagaacttttcttctcttttatttgttgaaagttagggatatataggatagtatattgttttgctctatgagaatttggagaaaaacaaatagcactaacatgtcatcttaaatagaaatttgaaaactagatggttaatgctaaggattagatatgtgtcgttttaaaaaacaaattttatcctcccaacaaaaataaagtacataggttattgtcatggaatttagtggtaagatatttatcatatcaactaacaaggattagccgggtcataaaccatccaagttgtataaaacagagacaagaaaggttacaatctttcagtcaaaattaaccattgaaaataataaatattgagtaaaaataacaatcatcaagttggaatcataatatatggtatgatgaaatctaattacacactccaacatataacttattagcatagtaatatacatgcagaaacagtaagatccaaattgtatttttgttactgtagtatactgcaaaatcaataaaatccaaaagttaaaatcaatcctaagctaactcatgtttatcaacattattgttcataccatatcaataatctagttgaaatcataatgtacggtatgaagaaatctaggtacacactctaatatataacttattagcatagtagtatacatacagaaacaataagatctaaaaattatatctttgttacttagtataacaaagaatcaataaaattcaaatttctaagatcaatcccaacctaactcatgttttattaacattgtttataccatatcacgttaatcccaacaacataatgtaaggaatatggaaaaacgacgactggtgacattatatgcatctcaacttgtatttgtttcaacaataaattatgcataaatttttcatttgatgttatttggagtgctaaatatgtgttataaattgagatgaagtccaaagaatagtattcatctcatattcatggagtgttaattttataggtgggatggtaaggagagtgagaggttaatgttatattaccgcaagcacgcacgcgtaaaataacatgacttggtaccatgcaaccatatattctgcctattaaaccaaccttgtaataggttaccaatagcagaatattgcttactaaaccatgtgtaatagaatgaaattatacttgtattagggaggaattgagtttgtgaaattatacggtgctgtgtgatttgtataggggagggatctaattaatttctaagggtctaacccatgaacatgaacccctacacccttattcattctcacgttaaaaaagtttaatagtatagcccactactagctccaattcatctatagccaatctaatagtcaattcatacaatagttgcttactataccattaatatatggtcccacctgtcatatacacactgcgtcttagagtccgtgctgcagctggctacatatctgtagcccgctgctcttctctctcatcttttatctcattaaaatatatttataactggctaatagtctgctattgtacctgctcttagtaagctactacttatcgtcatctccggacgggccgggttcgttggtgttgttctttatacttctgaaaaagcttactgtagttctgttggattcatgtcgaccaggccaggatcagcttcaattctattgctttccccgacataaagtatatgaaaccatctttctacaggatgttatgaaggttcattcgaaaatgcttcgtctcgaacattcgacacggggagaaaaatcggacgctctacaaacgacactgtacacatagcaacaactaggaaaacacttcagatcggtcgtccgatcttgaaaaaaaaatcggacacatcttactatgactttgcttcatacagactttgtcagatgctctctctgttacatacgctttatttctgagcattaatatgcatgaaagagagatgagacgaggttatttgcatgtacataacacctttttagcaaacttgaaaaatgatttttcttctagattactcatccaatctatgatacgattacaccattgtattcgttgcaattaaatctttacaacaagatctcatatgactatattataataaaaaacacacatatgtttcaaccaattaaacttaatgtttcacatgtgaaaattagatgtttcagctgaaattctattatgttgcacatatttatttagtgtcacgatgcatatatctttctttaatatatctcatggtgttatttgcatgtttcagtaagtagtttattgtgtttcactagtttatttgtaaatgttgcatatgtattggttgagtgttacaataagtattcactagtgtactcacaatattccactaaaaatgttttacctagtgtactcacaatgtttatgtatagatctaatgttgtagtgaattgaaaaattcttttacaacaaatcactcacatattatagaaatcatctattaagagaattcgtttcattttttcttccacaaaaaatgtttcactttatatggatcaaatgttgcggtgactcgaaatattctttcgctatttgctgaaacattgtttttatataaggtgaagcagcgtccgatttaaacgattaaaacattttcgatctacctagtgaaacaattccaatatacttggtgaaacagcgtgcaacatttaaaaataattcaataataagctttttttttcaccggaatatattcatgtgtggtcttattttaaagatttaattgcaacggatttaatggtgcaatcggatcatgatttggataataatttaagagaaaaaatagtttaaatagttttgcatgcatgcatgcttgataacgttggatggctgatggcgtgcgcgcggatcggacggctcatggatgcgtccgattattcgtctcgcgccgttcgtccgacgcgtagcgttctccaggttcatccacaggaggcattgacgagatcatagctcaacgcctgtctggtccaaaccgtcggctgttcgcaaccggttggtggcaccatacatctcaatcgtcatctcgatcagcgcattaaggcctggtttagttccaacttttttatcaatcttttaacttttccatcacatcaaaatttttctacacacaaacttctaacttttctatcatatcgtttcaattttattcaaacttccaattttagcctgaacatcgcaccctaaacactctaccgggaatcgttgcggcgcccgcgttgggaggtctatgtcgatcgaacgaacattcctgaccacgctgaaccagccatcgcgacgtcgttggtcgatcgcttgcgtttccacactgatcgggaattagctccggacctggggatcctctcgtggagtcaactgatctgatctgcaatccatgtgatctgttcagtagtaattcctccgtcccaaaaaagacaaaccaacgtttgaccgttcgttttatttgaaaaaattatgaaaagaattaaaaagataagttacgtataaagtattaatcatgttttatcatctaataacaatgaaaatactaattataaaaatttttcatataagacggacagtcaaacgttggcacagaaacccacagtttgcctttttattttgcacggaggaagtatagtataaagctcttcatctgaactcaactctgaacatttgcatgttgtgtctgactgtcggcaaaagttctattaccacgtgagacatttgtttgtacgaggaggcacactaatcaaaaccaagctataacaaaattatattttactccctccgtcccataatataaacagttttgaacttcgacgtagttttcgagatgctattttaaccaataatatctataaaagtaaaatgttttaaataaaaagaattgcatattatgatagtttgtttaatgataaatccagtaacatcaattttacacgattgatctttattgatttttgctattaatagtcaaagttaaacattatatttaacttggcactattttaaaaatacttatattttgggacagagggagtattacaataaatctgtgcattacctatttcggatatgtatcgtatctatttaaattcgttgtactagataatgtttatttaggtcgtttatttgagaacgaacgtaatattatagagtaggagtatcgttttgttggtattatcttagatgagaaatcatattggaatcttcgcaagagtaacaacctcatcctacacatattccgtgggagttctattttagatggcgtagtttctagtgcttgatattatcgttatagtttctacgtattttctacttggtattatagttgaatattatcaggagggagatggtagatgcctagatgggatttatcccataacctcgagtttttttatttatcttctctttacttattgattgtgcgcctgcttgtagaaaccacaaatgtaaatcatttacattattagagaccaggagtgtaaatcatttacattatttaaaaaaaaaacatttgtccgtggagataattcgatactagtaaaaaggaagaggaaaaaatctagcgaattggaggaggacatcgagcatagtagaatcgcaccgccgtgtcgtcaggccgcgggcgcctcggcgtggccgtcggccgccgcggcgccggcgccggcgccgtagcggcggacgcgctcgtcgatccaggcgcgcatgtcggcgagcacgcggtcgcggttctcgtcggactccccctggatgagcgagtggtacatcccgtcgtagaggatgaggctcttgtcctcgctcgccgcgcgctcgtacagcatcctggacccctccggcgaggtcaccccgtcgtcggtgccgtgcaccaccaggaacggcgccgccacctccccgaagctctcccgcagcagcgccgtcacgcgtgcgagctcccgcatcgtccccacccgcggcgagccgcggtacagccgcgggttggacgcgatcaccctcagcttcgccgggtcgcggatcgatctccccaccatcctcttgtccggcatcaccgcccatgtgtcggctaggccgaagaggaggccgtacaggaagagccgcacgcgggacgggtacatgtcgtcggggaagacgagcagcggcgccgacaggatgatccccgcccacccggcgtcgggcggggagcggaggtaggcgagcagggtggtggcgccgcccatggactcgccgaagaggaacgccgggagggaggcgtaggcgccgctccgccgcacggagaggaagaaggagagcgccgccctcgcgacggcctccgtgtcgccgaggtagccgcggacgccgtcggagcggccgtgtccgagcaggtcggcgcagaagacggcgtacccccaccgcgcgtagctgatggcgatgttctggaacatccacgaggagtcggagccgtagccgtggctcatgaagacgacgcccttgacgtcgccgtcgctggcggcggagagcgggtggaacgagtgcgtgaagaggcggccgcagggggactggaagtaggcctcggcgtggcggagacccagcgaggcgtagtactcgtcgggctccggggagtcgccccagaagtacttcgtcgccgtcggtggcggcggtggcggcgccatcgccggagacggagacggcagcacgcgagacggcgagaagatattttttttctcctttatttttcgttgacgaaagccagcagaaatggaagatgggtgagcagtgagctcatttattgtacaaaggaaaggaaaaaaagggttgcttcctctatttaaatttgattatcatatttgcaatagcgtcaagaccaagacaataaaacatccttccttttttaaatgagataacctaaaaaaaatgtcattgacaagcgtccaaatacaaaaaaatatcatcgataagtgtgagttctaaaaaataccattgtacaaacaattttatcaaaaatgtcatcgtcattatgattcctttcattccgctatgttaagtgtaataggacgaacaatgtatttaacagcgtagaatagacggaattttaacggtgatggtatttttaggataaaatcgtttgttcgatggtatttttttaaaacccacacgttgatggtatttcttagatttaaacgttcgtcaatggcattttttaattatctcttaattaaacctcatcaatcaaagtgttgtgttaagcatacatgtggatatgcaacgatgtccacatgcacgatcaaacagacatgtaactacagcatttactcctacacacatggataaatagacatgcaactattgcatttacttctgcataaataaacaaatagacaggttagatgatgatcaatttgaaaagatctcttaagagtgtggtcagaaggaggggttgggtacgtattattgcacaattaattaaatattagctattttttaaaaaaatagattaatatgattttttaaaacaactttcgtatagaatttttttaaaaaaacacaccatttagcagtttaaaaaacgtacacgcggaaaacaagataggtgagttaggaaaactgagataagaactctgtgcaaaggattaaaatgggatggagtactgctgtgcgcagtttcggtttccaattatggccaaacagagattatgacgagtgggaccctggataaggtgtcgcaggcgtggtggttggtggggccaggtccaatattttgttttttttttgcgaatattgggcctcattgggaccgttgcatgagtagaccatcttcttatcctacatgggccaccgcataacccactaactaagtttcctgcaaagtgagctgtagccccgtgcactgtgccggcccatctcgtgtcagatggggccgtcagttacgtgcacagctttcggatgaattttttttatttttaattttttttattaaaagttttacaaaaaataattttccattttgaaaattgacggaagtagtcgccttccgccctctgggagggcgatttttaaaaatcgccatcccagagggcggcgaaaatgacgtggcagacagccgttcgctctcgggcgacggccgtcaacgaaatttgcaggcggcccccttgccgccctccgctagggcgatattgtactgtgcggggggccgcctgcaaatgggcggcgagggggcatggaattttgcaggcggcccccttgccgccctccgctagggcgattttgtactgtgcggggggccgcctgcaaatgggcggcgagggggcatggaattttgcaggcggcccccttgccgccctgggggagggcgatttttgcctcccccctataaagcccagtcccccctctctgaaatttcattatattcactaaaaatccaaaaaaaacgaaagagagagaggagagggcagcagaaggggagcggcgaagccctgctggttcgctcacttcatcacaggtttgctcccatacatcttttgcatttgtactaatatgttatgtttgagtatatatgttgcgttttagttttagttccatatattttagcatatctgtagtacacagcacatatgtgtagatccagagcatagaatataatagtatgaattgagacatagacagtagtgttaattgtaagatatagtttagtttgatctggagaatgtaacctacttttagaattttggagaacaatattgtagagaatgtaacttagggcgtagtacagaaatgcgaggttaacgcagttattgttttcatcaggcacaatgtcaaataaggtcacatttcagatagttcacggtgaaggaaatattagatttggtccagatggtgttgatctgtcagattttgtaatgacatctaagggtatcgataggcctgcggagaaaacatttcagtcaatttatagttggttgttgagaggatttagaatagaccaagaagtctacacaatgtcagtatcagttgtagtgagtcgtgcaacagaaggttatttttgggaactaatgccgatggacagcactgctgcttggagacggtatgtggaaatggcttttgaacggtcatggcccctcgttatatttgtgtcggtacaagagaaagatataaatgtttcaatgcaaaccgaagatgtagagggtcctatcaatgcaagggatgttgttggaccatcgatgcaaaatgaggaaaatcaaccaagggaggagcaggccatgggcatggcggatgagggggagagagtcggtataattgttgatgaaatggagagggaagattcggataatgaggaagcggacgacgacgcatcatccgatgaggaaggtgatgtaatggccactgattgggcaaatgaggacttctctggacttgttatatcagagggtgatcatgtaccctgggagtataaggagaacgaggtaattgagggtgcaaggtatgctcataaggatgagatgaaggaggcggtgaagcattgggcagtttccttgcagagagagtttagggtggtcaagtcaacaaattatgtgtatgaagtgaggtgcatgaaggaagattgtccgtggcgtgtccatgcatataagggtaaatggaatgattattggaaagttagcattgtgaccgagcacaagtgctacttacaaggggtggagaagtatcaccgaaacatcacttcagcttttgtggcaagtgagatgtacagcagtgttgttggtaacattggctttgaaccaaaatcaattattaggcacatcgagaacaaattcaagtacaccataagctatgcaaaggcctggagagccaaacaaaagattattgagatgaggtatggcacatttgaagcttcttatgataatttgcctcgtttgttagccaccattgcccagaggaataataatacttactatgacctacatacatttacatcggttgatgatcgaacaaagagtgtgctgcaaagagcctttttctcattgggtgcttgcatcaatgcttttgtgcattgtcgacctgttctatgcatagatggaacttttatgacaggtaaataccgaggtcagatattgacagcaattgggtgtgatgggaacaaccaggttctacctatggcttttgcatttgtagagagtgagaacactgaaagctggtactggttcctagagagagtgcacattgcagtggtgcgtatgaggcccaacgtttgccttatacatgatcgtcatacgggtatgttgcgggctattgactacttgcagaacggttgggatgagaagggacttccagctaagtggcctgatgttcggagtcggtggtgcatgcgtcacatgggtgcaaatttctacaagcaattcaagaacaagcatcttatggagctctttaagaggctctgtgcacagaaccaagagaagaaatttaatgagttgtgggacaagttggatgagttgacaacgaagcaaacagaggagcaatcttgcagaccacaagttgaaggtgacgagcctcccatacctcttggtgcattacatgatgacccaccaacaatgagaaggaggtcagggtcggccatcagaaatttcactcagtggattgagaatgagcctaaggagaagttgtctctattgttcgacaccgatggatctcggtatggcataatgacaaccaatttggcagaggtgtacaactgggtaatgcgaggagttcgggtacttccattggttgctattgttgaattcatccttcacggcacgcaagcgtacaagaaaattggtccgtccatggccgataacaacatagtgtttggcaacgtagtgacaaagtacatggaagataaaatcaaaaaggcacggagacatagagttgttgctcaaggcacacaagtgcatcggtatgaaataatgtgtgttgataggagcaggcgtggtatctatcgcaagcaagccgtgcaggaatgtgtcttgaaggcggatggtggatgtacctgcagttgtatgaagccgaagcttcatcaccttccttgctcacacgttcttgctgctgccggtgattgtggcatatctcccaatgtgtacgtctcaaattatttcaggaaagaagcaatctttcatacatggagtgaggagatatatgggttcgggatcttaggatcttacacaacgctgagtgcccaagttttttatattccagatccatctaagttaagggtgaaaaagggtcgacgccaaactagacgcatcagaaatgatatggatgagtcagaagcaggtgggaggactttacgctgcagcaagtgtgatctgcgcggccatacttacaagaaatgcccgaagaatgcagaagttccaagcggcgcagatgctagtctatctggacaggcaagtgatggtaggcgaccacatggtgaaggaacaacaagcaggcgcgcaaggccaaggcgtcgtcgcgcagcaggcgattccatggtgtaacaatgctatcgatttaggaaataaaacgctgttgtgatgtgatgtgtgttcggactaaatacttctatcgtgtaatttcaattgaatgttgttgtaatgagtacctccgactattgttgtactagtagtattgcgaactattcggtgttgtatcataatgttatcgtgatgagtgttcggactaagtactcatatcgtgtaactgcagctattgttgtaatcagaaatattccgtatggtgacacttttgtttgtttgtactcttgtttaatatgtgttagtaattcgcttatgaacatttattacttatgttgactaattatttatatgtttctgaccaatctatttgatgcaggtatggtgtacgacacaccggcgctgttgaaccgtgggattgacaggaaccaccgctcgttcctgtcagcagtcgagggtgcacagctcggcaccttccgtccacgcacgtcgcgcgagtggttgcgtgtcgacccccgtcacattccttggtacgcgtatgttcacatttcaactcaactttgctttgtgttgtacttatgtttgaagtttgctctatacaggttgcgtgcggcaggccttctaccactttgtaggcttgttgaggcggcggcggacgaccgtgacccagcgaagcggtgggatgcagaccggtcactccttgtcgctctggtagaccgctggagacctgagacgcacacgttccaccttccctgtggggagatggctccgacactgcaggacgtgtcgtacctgctcgggctaccgctggcgggagcacgagttggtcccgtggacggtgttgttgggtggaaggaggatatcactgcgcgcttcgagcaggtgatgcgccttccacacctaggaccggccaacacccttcctccgtactctacagtcgggcctagcaaggcttggttgctccagttcactgtaagtaaataagttgttattatcagacatgcttatttgcgatcaacagagtgttttgtactaacatttcatttttaattgtaagcggaccttctgcaccctgacgctgatgattactcggtccgacgctcccttgaggcgtacctgttgtggttgttcgggtgggtgatgttcactagcacccacgggcacgctgtggacttccggctggtccactacgcacggtccatcgcggatgctcagccacaggacgtgccgcagtggagctggggttctgccgtgctagcagccacgtaccgtgccctctgtgaggcgtgcacgaagactgacgcgggagcgattatcgctggctgccctatgttgcttgagctttgggcagccgagaggtttgccataggtcgaccagtggtggacagcgcaccctacggggttggtcgcagcgcgcagtggccagaggacggtcccacgatggggacttactggtgtcgacgtggggttagtgcaacttcgctgcgttataagtttatcagtcgtcttcttttttttcttcacataacatgtctaattccgatcatgtttattgcagcgtcgttacgctcacgtccaggtgagacgaggttacccggacttcgtgttcgagtttgaccgtctccagccgagcgacgtcatctgggagccgtacacagaagaggccgtcgctgcgagagcaccgctaggactttcgtccttgtgcacacgcgaccaggcttactggctcaccatcctgctgatggtgttcgacattttcgttgagcctcactgcccgcagcgtgtgatgagacagttcggacttaggcaggtgtttccgggcaacgtgcagccgaccgtcctccctgccgaccactcgtgagttcggattgttcatttctaaatttttatgatacttacttcattgagccatataatttacctctcttcacaggttgactcgacggggacatctagcaggcgcactttgggctccacgtgtacagcagtacgttgacgactgggtgttagctacagaggaggtgatcaacgagctcttcccacacacggaggagaactaccgtgactaccttcgctggtaccttcctcgcactcgtgcgcgtgtgaccttcactccagacgccccagagccgcacgttgccgctgtcacggacgcgtatcccacgcaccatgaccgagactacttcgtgggggtacgtcgaatttgtattagttcttacaattatttcatttatcttgcataatataggacaactactgaattttttatttccatcttgcataggctgatgccgcacgggatatcagtgccgatatcaccgcagtccaagtgaggttgaacagaggtttgcacttgactgacgttgagcagagggtgaccttcgaccggatgcaggagaagatgcgtgcggtcatgcgcgtcttctcctgtcgcagcgccgtggacgtcgtacctccagctggtccggtacaaccacggcctcacgcgcctaccgtcggagcaggacctcgacctacggcacctgtttcgcacggtactgctcagcccagaggtttcttaagttttgtttatgtttttgtacgaaaacatcaccccgtcgtaacttgatgttccatcctcacaggacctcgtttgccttcgagcgcccctagcttcggagcagtgcgacctacagcaccggtttcgcacggtacagttcagcccagagattagttcatttttgtttcagcttttgcacgaatatgtcaccatgttttaactgcacgtttcctcatcgcaggacctcgtctgccttcgagcgcgttcgcaggcacgaccggcgcttccgcgagctccgcaggggcgttcgccacctcttcgggcgcgttcgccagctcttcctctcacggagcgtcgatccctcgcccacacggtactttactttttattaatactattaaatacatgtatgaaactgatggtccttgtccagcaggatttgcagccgggatcttcggtactggggcctcttcgtctcacgccggtaggactggtcctactagccagttctacgacgacgacttgcacggtgcacaccaccacgacgtactaggctcctctcagcttggaggagctccagaggcgcacactcaggagcagccagaggtcacacctgtacaggcaggacgggttggccgtgccgtacccccggaccgactcacgtactcccaggggcacattagggcgcagggtaggagggacaggggtaagaggcctcgtcagtagtgttctacctcttcagtccttatgtgaccgtttcttttggcttataaacttgtaaagcagtactacttttgctattactactgcagtactacttgtgtttgtctcctctacatagttcttttcattcatatggtgctagaacaacttatgctcacgacaacacactttcgtacaatggattgacacagtcagagttacttcaagtggcgggccgataatgcaacctgaaccgaccatacagttcattcatgcttggatggagtacgaacgtcgggtggaaattgcaagcttagactggaggaacaatccattagggttacataaatggtccgagcgtccaaagtgtgggtgcagagatcgctggcaggtggctacatcctttgctgaacaaacatttcgaaggagatattttgtctgccccaatgtagacaacgatttcgttgtatgtctaaccatttacaaaatccgctatgatttgcacaaaattactacccaaactgaataacattactatttttacatggcaatccaaggatgggtggatttactcgatggatcgacaatgtcactccatcatatcatggccagaagataacagagtcagaaacacaagtagagtatcaacgattgaaggaccacgagaatgcaatgcattctgaccgacctagaaggggccgataggttaccgcatgcttgattcgtcgggatcgacaaatttgtaccgtgtatcgatggcacttcttatctatcttatcattacaatgtttaattatggtggtgattttttgtatgcataagactaagggcctatttggattgctaccaaaaacatgccctaccaatattttggtaatttgaatagtacttgtgtttgatttcgattgaagcctattcattggtaatacgtaatctagatttgagattatgtagaacattcttcactacaattttacattttggcagcaaaccaaatatgatcaaatgcaattttaccttaccaaatatttggtagtgccaaaacttgcttatattttggcactaacaaaatatttgtacggtaacattccaaataggccctaaaaaataataaaattgtattttaccagtcttggagattttaatcttatatagttttcaatataaaaaattttgataactattgatatttataaaaaatataaagcacagtataaaatcgccctcccccagggcggcaagggggccgcctgcaaaattccaggccccccgccgcccatttgcaggcggccccccgcacagtacaaaatcgccctagcggagggcggcaagggggccgcctgcaaatttcgttgacggccgtcgcccgagagcgaacggccgtctgccacgtcactttcgccgccctctgggatggcgatttttaaaaatcgccctcccagagggcggtaggcgaccacttctgtcaattttcaaaatgaaaaattatttttgtaaaacttttaataaaaaaattaaaaataaaaaaaattcgctttcggatgtacacgtgatagagtgaccgggcggcgctgatacgcgatcagccgcgcgcctccacgcgcgcgcgatcactcgctcgcctagtctctctcgtatgtaagtactatatacatcgtatgtatatacgtatgtatactatactatatagtatatacatacgtgtatatatataatttttatgaatatattttaatgcataaaaatatatacacatatacaaagtttgtatacgtgtatagaaactttgtatcgcatatagaaactctacatatgcatatagaaagtttatatacgcgtatacaaacacgtatataaactttctatatgtacgaatacgtacttggtatacatacgaatataaactttatatttatacatctttaaataaacaaaaaaagaaccaaacaaaagatacaccaaaaaaaaccaggccgaatagaacgaaaaaaccggagaaagaaaaaacaaccgaacataaacggaaaaaaaaggggaaaaaaggaaaactcgctcctccggtcctccctcgcgacgcgtccgccgccccctctccgcgcgcgacacgtgtccagccgcgcggggaagggggcgcgcgactgatcgctaaatagcaatctcgagtgatgggtcgacaaacgtaacctaggacgtgcaactatagttggtcaaaaggcccatggccttacggtctagctcaggacacggagttttggtccgatccaggcacggctcaactattattgggcccatgccggtccgaccgactgttgggttgtgcctgagcctcttcctcgatatggcacggccaacgcttccgcaggtcatagcttgtcaacagccggtccaaagagaaaagggaggcaaaatagatttactccagtcatataagacacagtccaaaacgatgagggagcccaaatagtcttataacagacaataacgtgtagcctaaagagacgagggaggaaaatagacttattctaaggacgagtatggtgaactagtcgtgtcttcgggccgatacggcatagctcgagtcttactaggtcgtgcctacgccgtagatacagcccgtgggtgggcacggtgtgtcagtcggggtgtgccaacccaactgatcttaggtcgtgtcttggttgtgcccgaggcggaccatgccaagtagccaattagacatctatatgcacgcacgttgaatagggactatttctatcattcaataagaatgaaatcattttcatgtatactttgcacgtataggacttgtatgtattgagtgtaccatcgtagccactactacctccgtcccaaaataagtttatttttcattcatcacacacataccaatacaaaagcaaaaatactataatacatctactttatcaaatctcaatgcaactattcatcactttatctactcctaatgaggctgttcgcttgtgctggctgtcctagcggctatggctgtggccattgaaaatagctgccagtggcagcagcttggagctgccgcagctgcaaccgatcagcctcaatataattactctagagggagtattccccactttcacaagttctgatgtaatgatatgattactctaaaaacgaatttatttagggacaaatagagatggctaacaatgaacttaatatgggaggtaggaagtataaggtagccatacaactgctacgctgacaccagcacccataggcaaatctgcgtataacctatgtaaattttacaattttataatttcattaatattggtttattttagcacctaaacgaagtattaaagcccgtggtcatgacagttagacaagttcgcacttgtttaggcagttaggccggatggtgccaatatttatctatctatctattatatactaaaagtccattaaacgctcctaggtcgttaggcagttaggccggatggtgccaatatttatattttcctataaacactctcaaaccgccaagtggcaccctataaacactctcaaatcgccaagtggcaccataataaataagaaaaatctgaccatctatttttacttatgttggtggacccattattttgaatggttggatttagttagatctattttataaagaaaaaagaacatccggaacatcatatacggaaccaacgtacgtaatgccgaacgtacgtgcgtatgtactgtacgtacttccctgttgtctttccatattttcattcatgtgttattttctacttaatgagaaaataaaaacaaaaatacttttacaggtaaaaaaacataaatagaccaactaataggactagcagctctccctatttctaaatcgctacgtggtactattaaattagagaaagtattaaaaaatcttaaaaaatacaaagcgacggaccatcgatttctacttaaattgatggatttaagttgttagattttttaataaaaaaatcccaaacctctgtccctccctccccacccctgtgcagtgttaaaatccattaaacattttgtaaacacctctaagctactatatcacatacttaaataaaataaaatcttaaatttcaaaaaaaaagacaattatataataaaatttcattaaacatcttacaaatacttttaattcgccaagtggtatcttacaaatgctcctagatcgtcaagtgcactctaatccaaccatcgatttttatttaaatcggtgatccattatttttatattagaaggttagatttttttttaaaaaaaaagcacacattccgaacctcccgtcacgtacgtaccaacgagctatgttcatgagaaatcataatcaaaattatttttacattaaaaaatcacaaagagacctccacctattaggtctagcacctctcgctctttgactctaaatattctacaaatgcctctaaactgctacgtggtgctattaaattaaataaaatgctagaaaatcttaaaaaaagaacaaaacatttggctattgatttgttagttttttaataagaaaaaaaccccaaacctctctccctccctccccacccctatgcggtgttaaaatccattaaacattttataaacacctctaagctactatatcacatactccttagaattttcaaaaaaaagataattatatataaaagttcattaaatatcttaaaaatacttttaattcgccaagtggtaccttacgaacgctcctaggtcgccaagtggcactctaatccaaccatcgatttttatttaaatcggtgatctattatttttatcttagaaggttagattttttttaaaaaaaagcacgcattccgaacctcccgtcacgtacttaccaacgagctatgttcataagaaattataatcaaaattatttttacattaaaaaaatcacaaagagacctccacctattaggtctagcagctctcgctctgtgactctaaatatcctacaaatgcctctaaaatgccacgtggtgctattaaattaaataaaatactagaaaatattaaaaaaacaacaaaacatttggctatcgatttgttaggtttttaataagaaaaaacccaaacctctcttcctgcctccctccccatccccgtgcggtgttaaaatccattaaatatattattaatgcctctaagctgctatatggcattcttaaattagagaaaaatcttagaaattttgggaaaaaaaaccccaaccattagatatgacataaatcgatggacacattttttcaatggattaattgacacattatattaggtcattagatctatttttttttaaaaaaaaagaacaccctaaaccttcttccctccctcctttgcggcatacggtgttaaaagtcgattacacatcttataaatgctcttaagatattatgttattctcttaaatcaaagaaaatcctaataaaattctgacaagaaaacaaaacatccgaccatcggtttcgacataaacatctgacacattattttagtctgttagattaatcatttagaaaaacatcccaaacctccctcccttcctgcccatgtacagcgtgcgccattcttctctctattttttatctccttgataattaaaattaaaattatctatatgggaaaaaattacaaatggacctccatttattacttatatcatgttaggcatctaaagactttctgccaacttaattaatttctcttgacatgcctatacaaattgaccttggtactttcaaaataaagtttttagtacatagataaatatttttaagaaagatgatcatagcgttcgaattacacatatgatctacgaagtcactaatcatagcaggtattcatctagcaatatagacaatagggtgaaaataaaggtgtggttggttgaacatcatatcgataagcatgtaggttgtatctaaggattttaactatggaacaaccttgcagtggctttagcaataaatcaagtcagttcctttttttataagacaatacactttagtgatgattcactaaatacattatgaccattactttgatatttcaggagagaaaatttagaacgtatacctttaccccatactaggttatgtgttcttatattttcgtcccaaattgcaaagatcaaatcatttcaaggatgattcatagaatgaaactatccaaaagaaaaaaaataaaaataggcatgaaataaattgaaaattgaacaaatgttgctggatttaaaaccaatacttgatagaaaaattgaaacattttacaaggacggttagaatgaatatatatatatatatatatatatatatatatataattttaaaatacaatcaaacaaaaaaatgatattattgaatttgttttgaggttgtaaactatccttttggcgagttaaaataccctaaattttatcataggaaccacctccattgtttcgacacaatagtttctcatcaattcaaaaccacatgatttcaagtaattttattttagaatttatatgttgcaaggataattataaaaatataaaaagcttttcaaagcacacaaaataaatttaattttagtttagaatataatacaagatattttaataaaaagccacctacatataaatattcataataaaattttactcatattatacgagaaggtgcccacgcatgtgcgcgggctacctttctagttggtttagaacttcggatacgtgtggagcgccactgtgccagcaaccggccagtgcatgcaaaatagctataagccacgagctttccccgtacgaaatgaggagcgtgtgcgtgcgtcgccggaaaaagggagcaaactgaaaatgacacgaggcgatcgatcgagagagggagagagatattttgcacgctacgtacagcttacacgagccgagcccgagagtcccgtggcactcacgcgcgtaaagccaaaaggggtttttatcactaataaaccccaccccacacgccatctacgactatgtttatgtttagttcacactaaaatttaaaagtttgattgaaattgatatgatgtggtaaaaaagttatatgtatatgaaaggtttgatgtaatgaaaagttgaaagtttgaaaaaaaaattagaactaaacagggcgtacctcggaattatcatcatcccatgcactagaccaggccactagttaagctgacacgacacgagattaatcacccagtcccagaaagagcggcccgatatatgcagatgcagatacgcacgcgattcgacggcagaatcagtgcgttttcccgtactccgtcccagtatttgtccaaggccccccggcagctagcacgagggcgctgcgagcgaatggacggccgtgaggaggcgaggggccaccgggcgggggcggagtcacgtgggaaggacggacacgacgacgtcgcggtggcggacgagacgagagcaaagggggcatcgcgtcgcgccgggcatttcctggccgtcaatcggagcggagggagggtcacgcgacagcggtggtggcgcccaacaaacttttcgatcctgcaggtgcgagcatcggagcgttttgtatcagtatcagtgtgtgtacagtgtgctgctcgctcgtcgcgacgtgaggatggaacgttgatcgcctgcgaccagggaccgggggcggggcgggcgcatcccattcccatgcgtttcccgtcctctcactctcctcagacccttctggggtgtaggcacgcacggatcgatcggtttggcatggaacgtactactactactgctactcatcctgtaggctgtagcaaatcatgcaaaatgatccactgctactggcccctactgtagcaagtagtagtagtaccaattaacctcttgtcaagacttgtagtatctacctcaggaggccattttactttactgatattttttattcgcccttttctttttaaaaaaatacttattttgtcctaaaatataacaatctattactttctttacttcaaaatataggatgtaaccatcttttttttcataataaaaagacatgcatgtatacaattaactaatacatccaatttctctagattcatcttttttttattatagaaaaaccatctaccctcaacatccctaatcatattgagtgcatccattatatttattatggtaatccaaatgaggaattatatttatctttttatatggctgaatctctctttagtccgaatgtaactcaaattaatatcccgatcatacgaaaccgttattttatttgtttttcaagtgttgttcataatcaacgtggagtttactggagatcattgtcgtgtcaactgttgtttctatgcatcattctacttacaataaggccaagcgtgattcaacaaccacacccagtaaattatgtgatacctgtatattgtgtgttgcgtttattacgctttgctttaagatattgatcagcatcattttgacttgaatttaaaaattttggtttttaagaatattttgtgaaatacatagtacaaaccctcatatatttttagggataatttaaacatatgttttaaaataattttcaaaaactacatatactttaacaaaattatcataaaacaacatatttaaaccatggtaacataaaactattgttactcgaaagcatacatttagtattatcttcataaaacaataaattttagatgtgctatccctatacctattaacatagtaaaattttaaaatgtgtaattctccgagaaaatcgatgctccgtgttgcgaggaaaaaaatgacactgaatatatagtttctatatacaattgcttaaatttatagctttctaataaatttgttcatttagttttgtgatactataaattaataaatctatctatagtctcataataattttactaaactatctgtagttttacaaaaaaaattattttatttgttttcttaaccatgatgagaagagagcttaaacagaaacggctaagcgcctgtttgaggggattttctagttgttgcagattttaccagaatctccagttctctcaaacagtccagattatcacccagattctgagaatctgtagttataaaatccaaaaaataaactacaacccagaagcaagaaaacccagcttttccatattctcataagctggataccgaccagcagatttttagaatcttaagcacccaatactgggccttaaataaacaactaaaattaaattctactagaattcaaatcagtttcgtttttttctaaaataaattggttgtctttttactacagcctggtagtataacttttctagaggaaaaaaaattcagtacactgaatatacactcccaagtccgcgtctcccctcctcagattagcgaagaaggttcgttaggctaatctcagcactaagccagccacacggcccctcccactctccccactgctgtcgtcttcctccccacctcctaatctcaccggagtagtagtataagacacacccctccccttccccaaacccccgctttgccgagcgccccgaccttatctcctttccccccaccacctccaagatatttccccacctccgccgccgccgccgccatggagtccggcctcgtcgcaagccaccgcctccgcgtccccttcgccgccgcccaccaccgccaccacccggccgcgccgccgcacctcctccgccagcggcggggcagcgtcgccgccaccccactccggctcgggctccacctccccacgccgaccccgctccgcctccccgccgcgctcccgctccgcccttccctcccgcctctccgcgccgccgccgcgtcggcggcggcaccggagccggtggggtcggcctcgcccaagttcctgggcgtggagacgaagacgctgaagaagatcgtgccgctggggctcatgttcttctgcatcctcttcaactacaccatcctgcgggacaccaaggacgtgctcgtcgtcaccgccaagggcagcagcgcggagatcatcccgttcctcaagacgtgggtcaacctccccatggccatcgggttcatgctgctctacaccaagctcgccgacgtgctctccaaggaggccctcttctacaccgtcatcttccccttcatcgccttcttcggcgccttcggctacctgctctaccccatgcgcgacgccatccaccccaccgcgctcgccgaccgcctcctcgccgcgctggggcccagcttcctgggccccgtcgccatcctccgcgtctggagcttctgcctcttctatgtcatggccgagctctggggcagcgtcgtcatctccgtgctcttctggggattcgccaatcaggtacaatcaaatctttcctctcggatttagtagcagcaattgaagtttgcaaactattctcctgaaatatcggcaataactgacagtgatgttggtctacgaaattacaaaattgtcagttggttgtaggacattgttgttctaaacatttgtgaatagctgaacgggtcatgtttaaatttgtgtagattctcacttcaaaacaattggctacgtacacaaattctcagtgcatttaacgattgcagattactacggttgaagaggccaaagagttttacccactgttcgggcttggggccaatgtggcactcatcttctcgggtcgcacagtgaaatacttctcaaacatgaggcagaatttgggtccaggggtggacggatgggcgatttcattgaggggcatgatgagcatagtggttttgctgggccttgtgattgccggcatctactggggagtaaacaagtttgtaattgataaatcagctgcgccagtcgtcgagcggaagaagaaggtcggttttcttatgggttctatggtttgcaacttctgtttattgagctttcatttatggtgcttcaaacatgaccctgcaggataagccaaagctgagtatgggagagagtttgaaggtgcttgtgtcatctcggtatgtgagggatcttgccaccctggtcgttgcttatggtataagcattaaccttgtggaggtgacatggaagtcaaaactgaaggcacaagtaagttcatccacattgccagatgtgcaattgtttggtgataatatgagtggttattaactctattttctgttgcagtacccaagccctaatgaatattcttcattcatgggggatttctcgactgctactggcatagccacatttacaatgatgttgttagggagagtaattcttaggaagtttgggtggggagtcgcagctacaatcacccctgcagtgttgcttctcactggagttggattcttctcactgattttattcggtgagccattgactcctcttatggccacacttggaatgacacctttgcttgctgcggtctatgttggggcaatgcagaacattttcagtaagagtgcgaagtacagtttgtttgacccttgtaaggaaatggcatacattcctttggacgaggacatgaaggttagtctccaaaattcctatcttgatataattaatcaggccagttgctctaatgtcagaaaacatatggtagtattaaacagataaaccctgctacccactagttctgttggaattcagaaaactgtgctaggcatgtttgatagtacctcaccagatggttgatgcacttgctattacaagatgggttgggttactatgaggatagtccctgacacctgataggctgatagtagaatgcatacatatcaaaattgctagttctacaataatctgattaatttgttgattgtgactggaatgcatttgtctatcaaatttattgtgctttttttttctaagtgctaaccgtaacatttgtgatgtacaaatccactatagttgcagtccaatattattcacacattatctcaccattaagaacgtatggcctgtcaaattttaaggctgatataagattcaaaattttcacgcggttctgaaattttcttctcatgtgtgccttctattcatgatttcaggtcaaaggtaaggcagcaattgatgtggtctgcaacccattggggaagtctggaggcgccttgatccagcagttcatgatcttatcatttggatctctcgcaaattctacaccctacctgggaggaattctattggtaattgttcttgcctggttgggtgctgtaaggtcccttgactcacagttctccccactggcaaagcaagagcttgagaaggagaaaatgctgaaagcaaagacggtcgaaacaactgctcaagttgttgggtcaggaaatggttctctccaagaaactctagccagtgagaactctgcgaatggttcggccatcaaagtgtctcaggaacctgagagtacgacctcggagaagtctggtcaacaatctcaataagttctttgccttgcaaatttagttagtataagtcttccgtggaatcaaaagctgcttagtttggcctgccctgggttgttgctgaggaaagcagcagagtggtaagaaaaataagcaggccattttttttgtgttgttgtagcatgtatattttgacttcaccttgagaattgtctttagttctttgcttgagaatatctgtagctgtctgttgttccatcccatagatatgaaactgcctttttggtaattacaattttgtggaaattccggttcctcaactcattttgcatctactagtggccgatgcttgcaatttgcaaatgtttatttcgtgctgcaacctgcaaccttcaggaaaggaccaaaacttttcgtcggattttccagactaggacgttgtctgatctggaagtaaacgttggagaagtttttgaatctttacaatagtagctatccatgttttttttccggccttgcaacctttaaatttagctatactagagttgtgacatctatgctgatgtttactacaagacaaagtgttggtatcagaacttcagaagactcgggctgccagccagcgaagaactgccggagccggtgaggtcagcgcagtccaatggtcaccggcggttccacctctcggtcgacgccgtcgccggcgctcgctcccctgccgtcggccgccgtcgtcccacaaccgcatgatatgcctctcatttgggcccgtacattcgttagcgacagttccgttacggcctcacgtcagatccgatcccgttctggcccaaacagcatgggccaaacgtgagccgaagttccattccagtccaactaatatgggcccgcacgaaagctgcgatcccgttctcgagcccaatttagatggcccgcacatgagtcaagctagtatggaataaagtctccttggactatcgttctccttcaaatggcatccctcaaccacacaaccgggtataaagtctacctcaactatttaaaaccggtgtaaattaactactttggtggtttgcaaggtggttttggatgatgtggcgattacatggcatgttaaactggtctttatctggcgtgacgtctatacggcgtttaaatagcatcacagtcaacccaaaataaaaaaaagggcccacaagtaaatcgctcttgaaaaaatgtaaaaaaagacccattaagacccacgtgtcattctctctatctctcatcacttcttctcaccccttatctcttcacgagagcaaggacgcacgaggcgcccaatgacatggcaggcagtgcatgttagcggcggtcggtgggctggtggcggagtgcaaaagtcgaggaagaggcagaggaagcacgggccatcggccgcattgagcatcttaggaagaggacgtcggatagcgatagagagacgtggaagtttgggcgtggccaacgaagtagaggagcttgggctaggtttgggcatctgcggccacccctcgtcactaagcacatagatgaagctggagtgccgctgacgtggcctttccaagcttctattctcgccaccaaggtttgttggtgcctccttccaatgagctctgccttcacctccattgctgcgaaccctggtagccaaggtgccactaagtgttgcgcagcttaaggagacaacaattcaggaaaggggatggtgtgctgtctcagaggggctcatcggggatgatggtggataggcatgccagctcggcgggactcatcgacggcgacccgcgctggttctggggtcgagatcaaggacgtcgtcactcttggcaccggcgtggaaaatatgagagatgaagatggaggggtaaagggagagaatacttacatgtgggcccactatgcgtttactaacttttatctgattgacatgtgggtctcattaagttttttattaattatttggcatcatgtaggagaaaaccatcggccaaaccgctgagggattcagttttggtagttgtagtatgtgatgtacccggttttgtggtagagtaatgtgattcaactaaggggcaatagttgaagtatggaaaatagacctactccaacctgtattgaaagccgcgatccttccaaacgagatgggcctgatctttgatccggcccacgtagaaaaaacccacgatcggaacggggacgacggggattggtcacgaggggacacacggatctggattgtggatgccgccagcccaccaccaccatcaccacgcgcggcgtcagatccgacagcctccccacccattccgctcgctcgtcgactcctcgtctccgcgagagagagaaagagagagaggggagggagcggaggtaaacccaaaaccctagcccgcgtcgtcgtcgtcgtcgtcgccggcggcgagatgtcggcggcggtgaacgaggagacctcggtctacgtcggcggcctgccgtacgaggccaacgaggacatgctccgcgacgccttcggccgattcggcaccatcgtctccgtcaaggttcccttccctacttcccacgccgcgcgccccccaccgctatcccgtcccgctctcccgtcgcaggggtttgcggcgttgaggagttttagctgttgacggttgtttggtccgagctccgaggtcaatcggcttgtttatttttttttctagggtttgttttgctgctgcccgctgtgatgtaaaagcacgcgagatgtcgcgagactcgttttggtggtcgagatagctgggttcaacaagggcgttgtttgttttagggtttttatttggatctacgtcctaatgcgagacatggagtggctgggtaattgggactctggagtgagggctcgggatttggtggggagatagttgtattatctaaagcgggaggggggaaatgaaggtgaatatgtagtgacatgctacttggttcagtcacacagtcacttattttgctgctaagatgaatagggaggcaagtagctcatatttcaaattagtttttagggtaaatttacactagaaggattcagggttccctttggatattagtttggatgcgttcctttttttgtgttattggtacttgatttaatacctagtagaatgagaggttcaataatgcaagtgatagatgtggttatattgtttctggttcaagtggaggaggcatggcattactgcaatgccaaagatgggtttaaagttttagttcccgagtttgccgatacaataacagaaaaggatttttgctttgaagcagtcaatgcactattttttccctcttaaagtagttacctgtcagataagattcaaattatgtgagagtacagaggaatctctttctgacctttgcaggtgataaatgatcagagagtcagaggcaagtgttacggttttgttactttcactcatgctgatgctgcacagcatgctatctcaggcatggacggcaaggtatgctcctatctggaacttaacaccttttattatctcttgtattaattacatttttgtttgcaacagagaataaatagacgtgttgttagagtgaatgaagtgcgtactagaggtgcccgagaattcgggcgtgaaggttttcggcgagaacctggaagcgcaagggatgcttattgggacagaagggatagagaaaggagctatgaccgtgacagagatccctaccatgacagggatagtgatagatctcgtgaccgtgatagagacagattttacgaacctagaggctttgatcaagaaattgactatcccatggatcaagatcatggggatgaaaggcgtagagactacgaccgtgcagcagaaatgcataatgttgattcggataatgacagagaaaaagaaaactctaaagactatgatagtgaaagagagaaagaaaaggagcagcgatcaagaaaaaggttcaggtattatcttctcattgtattttagctctgttaatattgctaatcatgcacttgggtggaaatagatcatgtatatatatattctagggaagatatttgtattgtgatgaaggcatgaagcttaattgaagttgcaaggcatctgagttgaatttccacaaaaaatatatttctggttgatgcatgtaattgtgtcagaaggttgtaatttctttagtggtgttatttagtttttaggactattgatgtggcatattttttgataaatctggataggatcctggtgtccttagtaaagtttcaaccacgaaaaccaattgttctattcttcttcttcttattattattattattttgccaacttacccaataatttatactgtatattcatttttatcaataatgtaaatttgcaattgttaatttactaattgactactccctgaatttaaagttgatggtcagtcttgtccaaatttgttagaatttgtgcagctgaaatgctgaatgcacctttgtagtgagtagtgacttgcagatatattgagtcttgtaagttgcttttacctgcatatgtcatctgtcagtcttgatttcaactgcaagtggctgattgtagattaaattgggttgacacctttgctatctcctagggggtgatggggatagacattggcacattgcaattaagtttaccccacagtgatcaagactaacagcacacataccaactgaatgggtttcacatattgagtatgctgaggatttaaaactgaaattatcgtatgtgccttgtcgccgtgattagcactttaaacaagtgttctgctggatctgaactgagatatgaaaccataaatagcgagcctggatccagggttgtctttctgttatctgcgcaataaaatagagtgtactttcgtatgtcatacttgaaatttgccagccaaatctcatttactggtatgacatctgttatgtacttatgttggctggtgcaaaatttacaaagagcactggtgagtttcgagtcttcatgtaatgtctacagtctattaccttctgctgtgtctgctttgaaacaaaatttgtatatgattaatatttttgcttgctaccaagtagtagagaagttaggattgagtcatctctttactttcctgacttcttctgtacagccgtccaaaagatcatgatagcagggatctatcagtttccagtgatgatcttcacagtgatgtaaatacatctctctttgttctgttacttcaaatggaaatttgtctatgagcttttctaaccatttattctattgcttctaatttttgttgggtttctcatttctcctttctttcttttcatgcatttatcaggcaaaacgacagttgaacaaagcaattcaaatgcgcgaggaccttgaaaatgaggtactctttttctttttcagctatgctctattttattagtcattatttggataatcaaagctagttcataaaatctgagtcagcaaagctaacattgtctcataagatacatttgatgcaacatgcctaaattgcttgaacaccaacagatagtcaactaggagcatgctaggattttgtcactactcatggtgctagtgcattagaccacatatttatctggctactaactttagcatttacaattgttatatagtgttctttgttctgtttgcttctcatattatgaaaaaatagtttgaacgctgtcctattacaggttagtcagatcaaagataaagttgcagcaaaggaacaacacattgcagatttgcaaaagagatcccaggtgatctgtgtatcctgatactggaatcctttttagcatctttcgcactgttattttttaaatttgcaagtgcttatccttgtccaatactcgggtttatttttttctgacaaactatttttaaatacaaaaatacagaagttagaggatgaattgtctgctgcacggaaagtttcttcagaacgacaattggttgttacaaaggtacatgtggtattttgctcacatgctagctgctgctttatgaaaataagcaacggataaccaagacaaatcacattctgtactttgaaaatattaaatgcagctgtacaaatgttttctgcaacttcaagactacaatgacagggtgaagatgtctgaaaaggagctccaggttatttgctcaacatatgatttcttttgattccctagagtaccctttattgaatttcagtaatcctgggtgcagtacctgcatgctcttgtagtcgtgcccagagtctgtggagatactcatgatttcatgaagtaatgcgttagcttagtttgtatttcttgggagttgtttgacctgctatataattgaactgctgtctctttctgtattacagtctcttattgacgatgcaatgggtgaggttgacattggtgaagaagccacaaccaaagatggttcaatgtatgagaatggcgtagcatgaaaatctgcacatcacaaaaccggtattattagtttatcatggtgctaactttcctagaagtacaatataccatgaagaactgtaacaagtgattcatgtaagtgaaggctaggaaaccatgtattagtctgcagattgtttagtgtgaacttttgtcggtgtagattattagcccgaggaattcttgcctgactttgacaagtgataatgtgtatgctgtccgtaccatgccaactcgagcagttatctgactttgaaatttgtccagaacctctttgttttctagaggtgtctctgcataggccactggttttggaatgggtttcgtatcatcacgtgcggtctaaagctctcttttttttcttaagaataatgttgtgaaccacttgaacagtctgtgtgccactagctccctgcatagttcaactgggctagtacaccaacacatatttttcaactattgcacgtccacgaatgtgtgccgtagtgctattcccttttcacgtttctaggagcagcacagttcttgtactatgttttctccaagcaaaactacatcagcaaaagctaaaaccgtatgctcctatcgtgatgaaaactattttggaagacgactccgaatctccaatgcagctggaagcagacttcgcaatgttggtgcaacgtgcacgacaccggttcggcgaccagaaactaatggaagcgaattaagaggccggcagtgcgaacgaacgaacggcggcggctcgccggccgcccgtgaatcccgtggccgtccgtcaccgtccccgtcgaagcacgacttccacgaccaaaacagttaaatctcatctaaagctactactatcacattgttttctccagagaaattctcccacaaatccttgaaaaaacaatggtcgagtacaacgcaagagctggccatctttgacctgacctgaccagacagaaaggattagcattattatcattatattttgtttgcgaggaaaagtgttgttattattaactggccgcaagccactgctgactggttcagacttcagagtccagagttcgtgatgctctcgattgccactggattctgactttgttaactttggcaagcgatatagtattattaacggaatcgttaagaaattaaatataagaaacgttatccttttcaacgaaggcttgaagatcggctatgtcatacagctggtcgtctagaagacgaaccgtggccgtccgatctggggtggcgactgaccagacctcgcgcacgccgccgttgatttcttgttgcctgcagatgaagtagtctactgtctactcccccttcgtagatggtctaccctgtttctccttttgtttttgccgtacaaaccgatcgccgatcagttattttggtgttcagtttgccttttgatcacaggtgttcgctagcaggaacagcagctaggggagagtacaagagagtgaaaaatcagttcgccggcttacacattagcccttgtttagtttccaacttttccttcaaactttcaactttttcatcacattaaaacttttctacacatataaacattcaacttttttcttcgaattttcaattttaatcaaactttcaattttggcgtggaactaaacacacccttagttagcttggaccaagggtccttagcctgtaccttttctctttcttttcgccatgtacagttctcttttttctatttaataaaaatcaatgaaccccctccaaatatagatgctgagatttgtaacctgcgtattcttttgtacttaatgaaatgataggagagatgtgcacgcttcgcaagaaacatgcatgaattttcctatatataaatttccaagaaacatattaaatccattgttaatttatttcatttatttgtactctcgaataattgctaaaaattattcaactattcatccattcaaccattcggcacataagagtattaattccaacacatccaaattgcatgctgtagttctcaggcccacactttttccttttgttttgatcatcacgatatctggcaacattgtcgctgttcatggacgtgataatctacataccaagctagtagtaataaacactacagcatgcagccactaattgacgtttacctgcatagctgacttcactcgcaccactaatactaaacgcacccccttgccgtacgcgggaggtaccccaacaccgcgaatcccggcgacacgtggaacaatcccacccgcagatcctcccaccaacggccacgatgaccccgatgccccctagtgcccgggtcagacgaggcggacctgaccccgaaccggtcaagacgtttcggcgcgaaccgaccggccggtcaaactatccacgctcgagaccgcattaaaaaaattaaaaaaaattcgaaacaagcggctgcgtcatgaccagcgagcccgccatttcgactaaatctagtaattagctatactaatcatcaatcacctcgctaatctccgattaatatgtaattaagaggcgcgcgtgggtggcgaggtatatataccacccccatcaccgtctcctccaaccaacacaaaccctcgcttctttctcgtcatcttctccactcgagcagcagcaaaaagctgcagctgcaagcaagggcggatcgatcgaaggagagatcggagttgagaggaggtgatcggagttgagaggaggtgatcggagaagatggatatagtgaggatggggagcgtggcgagcggcggcgggagcgtgcggcggacggcgtcgtcgtggagggggacgtcggggaggagcgacgcgttcgggaggtcggtgagggaggaggacgacgaggaggcgctcaagtgggcggcgatcgagaagctcccgacgtacgaccggatgcggaagggcatcctcaccgccggcggcgtggaggaggtggacatcggggggctcgggctgcaggagaggaggaacctcatcgagcgcctcgtccgcaccgccgaggaggacaacgagcgcttcctcctcaagctccgcgaccggatggagcggtgaggctcaattccattcacttcctcttcttctcgatcaaattcaaatttcagacacaaaaggtgttcatcatcagtagcaactgaaagatagtgggggaaaagtgatcagtcatggcttcttttccttctttgtttgtctttgtttttgagagttaattctgggtggttttgaaatttgaacttgtgatgatttgatttgcagagttgggattgacaacccgacgattgaagtgaggtttgagaaccttagcatcgacgcggaggcatacgtcggcaaccggggaatcccaacgttcaccaacttcttctccaacaaaatcatggtacgcatttggatcatccatgatcatcatggaggagctgaaagagtttccaagttcagatgttgttaagctcgtcctgcagcttctgattcttgttgaactgtttggatcatcaggatgtgctgagcgcgatgcggatcgtttcgagcgggaagaggcctatctccatccttcatgacatcagtggaatcatcagacccggcaggtgaggaaaatcaagaactgttcatgtgtcggattatcatattttgatgaaaggttggagcttaataatgtgaaatttgttcaggatgtctctgttgcttggccctcctggttctgggaaaaccagcctgctcctagctctggcagggaaactggactcaacactgaaggtaaccacatcttcacatgtttcttgttaatttccgagtattcccgtgttttcggacaaaaattatcacatgggaaagattagtcgcaaaagttgtaacatggctgaatttgaattttgaaatgctcaggtatcaggaagagtgacttacaatgggcatgacatggacgaatttgtccctcagaggacatcggcttacatcgggcagcatgatcttcacatcggcgagatgactgtgagggagacactggccttctctgcaagatgtcaaggagttggaactcgttacggtacgcagcatgctgcactgaaagtgcagagcaatttgtttcgcttttggtgaagttattcttatggtggttttgttatcacgcagacatgcttactgaactgtcaagaagggagaaagaagccagcattaaaccagatcctgatattgatgtttacatgaaggtaaaatgctagtttattcaaagcacaagccttccttttttttctttttttttttggaaaagtatacaagaagtgctcaaattgttgttcccttgtgcaaacaggccatctccgtggaaggtcaggaaagcgtggtcacagattacattctcaaagtgagtacaacacactacaggaaaatagagaaaaaaagaagaaatatacatgactagaactaattaagttgctattgcagattctgggtctggaaatctgcgctgatacaatggttggagacgctatgatcagaggtatctcaggaggacaaaagaaacgtgtcacaactggtatgtgcaatctgcagtcaacaaagaactaggcatgacagtgttcttcgatcatagtgaaaaaaatctgacctctcaatccactgaatttacgtaggtgagatgcttgtcggtccagcaaaggctctgttcatggatgagatctccaccggtttggacagctccacaacataccagatcgtcaactccctcaggcaatctgtccacatcttaggaggaaccgcgctcatcgcgttgcttcagcctgcacctgagacgtatgacctctttgatgacattgttctcctctccgagggccaaatcgtataccagggacctcgagaaaacatcctcgagttctttgaggcaatgggcttcaaatgtccggagaggaaaggtgttgcagacttcttgcaagaagtgagtgatccagcagagtaatcttccctgcatgttggactaggaactcaaatttgacagtgttcattctgaatgcacaggttacatcgaggaaggatcagcatcagtactggtgccgcagagatgaaccataccggtacatctcggtgaacgacttttcggaggccttcaaggaattccatgttgggcgtaatctgggctcagagctcagggtgccctttgaccgaaccaggaaccatcctgctgctctcacaacttccaggtatggcatcagcaagatggagcttaccaaggcatgcttctcgagggagtggctgctgatgaagaggaattcatttgtttacatcttcaaaattctccaggtatgtatctcgcatcttgaattttttctctctacttcgggaccataaataaaatctgacgaaaggtacatctgtaccagctcataatccttggaagcatcggaatgacggtcttcctgcgtacaaagatgcatcgacgcagtgtagaagatggtgcgatcttcctgggtgctatgttccttggattagtcacacatttgttcaatggatttgcggagctcgccatgagcattgcaaagctgccgatattctataagcagagggacctgcttttctatccatcatgggcgtatgcattacctacatgggtgctcaaaatcccaatatcattcttagaatgtgctgtgtggatttgcatgacatactatgtcatgggcttcgatccaaacatagagagattcttccgccattatgtgctgctggtactgatcagccagatggcgtccggtctcttccggcttctcgctgcactaggaagagagatggttgttgcagacacgtttgggtcatttgctcagcttattcttctggttctcggtggtttcttgatatctagaggtatgccaagtaactcatatattgttccagtagtaacaagagcattgtactgagttctccttttgcagaaaacatcaagaaatggtggatttggggctactggtcctctcctctgatgtatgcacagaatgccatagcagttaatgagttccttggccacagctggaacaaggtaatgcagtgtctcctgcaccaactcaaacctgacaatctaagtttggatttagataactcagaagcaacctaatctttgcgcaggttgttgatccgacacaaagcaacgacacgcttggtgtccaagtccttaaggtacgtggcatatttgtcgatgcaaactggtactggattggcgttggcgcattacttggatacatcatgctcttcaacatcctcttcattctgttccttgaatggcttgaccgtgagtatcatctcagctctgaaacacatagattagcatattcaaacatcatttatttggcattgacaccatattatgactgcagcacttggaaaaggtcaggctgttgtttctgaagaggaattgagggaaaaacatgtaaaccgtaccggagaaaatgttgagctgctgactcttggaacagattcccagaattcaccttctgatggtcagtctttttagtacattcctctgtattatggcattgaacaagatatgccattttgttgtgtccttttaacaagtatagcaaatgcaggaagaggagagattacaggagctgacaccaggaagagaggaatggtacttccatttactcctctgtcgatcaccttcgacaatatcagatactctgtggatatgcctcaggtaagcaagcattggaagcctccctgtgtgtaacaaatataccaccaaatgctattatgctaatcccgatgcacaatttttgacaggaaatgaaagataaaggtgttactgaagatcggctactgctgctgaaaggtgtaagcggagctttcaggccaggagtccttacagcactgatgggtgttagcggagctggtaaaacaactctaatggatgtgctggcgggaaggaaaacaggcggttacattgaaggagacatctccatctctggatacccaaagaagcaagagacctttgctcggattgctggttactgtgagcaaaatgatatccactctccacatgtcactgtttacgagtcccttctgtactcagcatggctccggttaccctctgaagtagactcagaagcaagaaaggttagtcaaacagcctttactctgctagctcattacacattttgcattgtgatgctgactcacttcacggatgcagatgtttgtggaagaagtcatggaacttgttgagctgacatcactgaggggagcactggtgggactgccaggagtgaatggtttatccaccgaacagaggaagaggctcactattgccgttgagcttgttgccaacccatccatcatattcatggatgaaccaacttcaggactagatgcaagggcagctgcaattgtgatgagaacagttagaaacacagtagacacaggaagaactgttgtctgcacaattcaccagcccagcattgacatatttgaagcttttgatgaggtaagttgaagcaagggccaaaattgcacaattcttggatgcctctcatacgaacactaacaggctattcttgaacttctgcagctgtttctgatgaaacgaggaggtgaagaaatatatgtgggccccctgggacacaactcatgccatctcatcaattactttgaggtgagcctcgatacttaaatactgaagtgaacaccaaatttccaacttaagacatgcatggtaaccttgctcgctgctccaaatttagggtatacaaggagtgaggaaaatcaaggatggttacaatcctgcaacatggatgttggaggttaccaccctagcccaagaagatatccttggcatcaactttgctgaagtatacaggaattctgatctataccagtatgtttcatgacaaaagccccccaaaatgttctttttctgctttttctgtgttatatcactgattcaattgcaccattgcaggaggaataaaacattgataagtgaattaagcacacctccacctggatcaacggacctacacttcccaactcaattttcacagcccttcttcacacaatgcatggcttgcctgtggaagcagcacaaatcatactggagaaatccgtcgtatacagcaactagaatcttcttcacaacagttatagccctcattttcggcactatattcttgaacctagggaagaaaatgtaagtatctttgctaacaaacccaattaacttgatctatgttggcatgttgtgagaaagaaacttacctgtgcttatcttgcctacagaaacaagagattggatctgttcaactctttgggatccatgtatgcagcagtccttttcattggaattcaaaacggccagactgtccaaccaattgtagacgttgagcgaacagtgttctaccgagaaaaggccgctggaatgtactccgctctaccatatgcatttgcgcaggtaaatggtcatagctgcatatttaaacaaaaaacaattgcagtgtgcttcctttattatacggaaaaaaatctaacaatttatcctttcaacaggttcttattgagataccacacatcttcctccagactgtcgtgtatggtctgatcgtctacagcctgattggctttgactggacagttgaaaaattcttctggtacatgttcttcatgttcttcaccttcatgtacttcacattctatgggatgatggcagtcgccatgacaccaaacagcgacattgctgccatagtctctactgcattctattgcatatggaatatctttgccggcttcctaatcccccgaccagtaagtatctgatattcattcattgtccataccaacctttaagtcttttttctatactgttgatgctgaaatatacatggctggtttgcagaggataccaatatggtggaggtggtattcctgggcatgcccagtggcatggacactgtacggacttgttgcctcacaatatggtgatatcacaaactctacactggaggacggggaagtggtgcaagattacatcagacgatactttgggtttaggcatgactacttaggttatgtagcaactgccgttgttgggtttgctgctctcttcgcgttcgtctttgccttctccatcaaagtcttcaatttccaaagaagataagagcaccatctcatcttgattcaagtttggataagtttgctgttgagtactggcacacagcactgtaaatgaggagagaatgtattcagtatttgtttcattcgtaggcaattgacatctctatctgttcagtttggcatttatcaaacagataagaggcatgtatgtaaactgtaaaaatatgcaatagttccatgatgtaattttttccataatattgtcaagtatttgttcaattgaatctcactgccttcaaaaagcagcaaatgaaacattaatgtgaaaaaaaaaagatggcactgctatataatgctgaaaacagtagaaactttagaaatctactacaaacactagcattaggaactgatataatcaataattcaagattgctgatgatgttgtgtgttcagcatataattaataatttacgattattgtgataacatattaccatttggattaaaaataaccttgatgcgaattttaaatgagacgtgactcacatttctagacagcaggacagcaaaagtattgacaaccaaagacaaattcagatatccaactattgaagcttctaaggtgtgccatatatttaactattggataatttgggaggcttaaagaatatcgataaaggtttgcaattttgcataagaaacgaattttatagtcaagactgattgtcatatgaaaataacattccaaaagcaaactatactttgagacaaagttttaaacagacatccagcaaggacaggccagattgtcatataaaaataacattccaaaagcaactatacttcgacacaaacttttgaacagacatccagcaaacctctggtttacaagaatgtacagagcatggactgcatcagggattattgcagtcatattcacaaaataacttgtgccatttattgagcggcctttgtctgtcaatcaatttggcccaaccaagggaaagaaagatgactgttcaacaactatattgcacatttcaacatgtgatagtttctcttaggcaaaaaaacaacatggcctagttgcttaaaaaccgggggaggggggacttctctatacaaaagtatggcattgttaactaacaataagtcgaaaacagatccatagaatcgatagtcaacttttttttttgcagcaatatcgatggttaactgactgtgagaaataaattgttgatttagattagtcgttgttttcacgaaacaatgtaatcctccaaaattgacattggactcttggtaatcctcggaagattttgtcaaaattgccaaagtgttccacaacaaaagcacaagtggaaatggtgataaacagcaatcgcaccaccaaattcagcgcaactcagaaatccccaaacaattcccctccagccgcactagctcaggtacagaaacaggcacattttgcaggggatcatccaactacccagcactaaacaatcgatggaagtacagatcaacaagatcgcctcccacattcatacagcaactatagactggtaattcgcgatggcaacatacacccgcaggaagattaggcgcgggatggatctgactctgaggagaagtagggttacaggatcgttacccagagccacgccgaccaagcgccggagtaacgcgggcggcggcggccacgatccgcccgtgggccggccgccggatcggcatcgccgccggtcagcgcggtcgcggggcacctcggatttcgcgcctgggttgggttcagatttcagggcttttaagtactcatagtttaatttaattagagaaaattataaaaaaaaaatatagtgtggcatgtataaaaaaagtttaatttaattagataaaattataaaaaaatatagctggactcatagtgtgacagatagaattttagtataacagacaaaattgagtacatataaacttttcaattttcccctttctgacaaaaaaaaatatctttaatgatctaaccaccgttggataagaaataggcgtgggatcactctcaggcctgtttggggagtttaagattttgagaaacaactggttggcagccagtttctgagaatatgaaaaagatgggtttttcaacttctgacttctagttcactttctagattatacaactacggcttctcataatgtggaccaaaaactaaactgtataggggagcttctaattctgagagaagctataacaacgagaagctccccagtctccccgaccccaacttagcataagagctttttgctcttgtccatttctttacacatccatcgattatcctatgatggattaattgtttcacatctctcaaaatacatttcacccaaaaaaataatcttttgtttataccaattgttttaagctatttttaaaatttatctgtacaataaagtaaatcgttgcaataacctgctgaaaatttgtttcaaattttagagctttttccaaatttgaattggagaattttttttataacatttgaacattttttttcattttctcctttgctttctattctcgcaatgcaaaactgaagatagggagaaagaaaagaaaggcaaaaataattcatcacaaacaagatgccttcatgatccactgaactctacagttatttagttctgcatatcttcccgtctaatctgaacttctgtgtatcagtttatgcaagcagaagaaataactggataactgcaacatgaatcacctacacttatgtttacacaagaatttgtactacaacaatgaactgacatgaaaaatcagaaatccagcttacaaacttacaaccacaatccacctgcaattcactcgctcactcatagtcacagcatggagtacataactattagctagctcaccacggttaacgcatagttaacacacaaattaaaaccgagaagaatcacaccaagctagccttttattatttcgacgaacaattcgctaacaaatccaggaaatcgatcttgatctctatcagttgtccttcttgcagcagcagcagaagcactcgaggcagtgctcgcaggtttcgtagcagcagaagcagcagcacagcatgaacaagctgcaaaaaaggaaaaaaaaaataaatccgacacccaaattaacggcaaccaattaatcatcatgtatgcatgtgtgattgttcttgcagtgccacatcgttgcagatgcagtctgatacagagttcacatgctgagatgcattcagaagttcagagttcagagctaaagcactggtactgaactgaagctactgcatgcagcaagaacttgcagtatgatcatgcatgcagatgcagagtgttgtgtttctgtacaaaccaggcatagaggaagcccttctcttcatggcgtttcttgacatgctccatggccgacagcttctggtcaccgccctgcgatggttcgtccatcgtcgtcgtcaatcgatgcttgattattcgcggtgaacagcgaggagaatcgcaaaactgagatacttcaaactaaagatggagaggtgatgagcaatggtgtggcttgttcttgctcctgtgttctagtgtggtatataaggagaagggaagagaaaggctggctaggctagaggcctagagctctacctaaccccttgcaatcttcagaattcagagcagactgtttcagttaacagctactgatagtgcaccattgtttaattatttctcttttgatttgtgtactaatacgatcgcgtcgtggtcatcgtgttccccaccaattttcagctagaaaaggagcatatatagctaggattaggagatgcctctgaagatgctctgaactgttactgtgatagtgatgctgatggtttgatggatatggctaaccccttcggatgcttcagttgctgcagcagtgatctgcattggttcttgcaacagatgggactaaaacagtgtatgttgaacaatgcaacattggtttgaaactgcaaaagaagtgtccattagttcttgtatggaagggactcaacaccaaaatacaaagccaatacgaccgcattcagtgcaccattttttttctccatcaacttctttttagaaacatagtatgaatgtaggtgcccataacgtgcgcacactcatccctataaacgcacacacaccctatccatatgagcacctccggaagactaagtcaacgtatcttgagattaacaaagttaccacagacgcatcgctgttgataggtacatggtctattactaaaagaataattaaccgtaaatgcgagcacccgtgtcaaatctaggatttgaacccaggtggactggttccaccacaaggaacctagccatcttcggaatgtaggaattttacagaattttcacaggacagttcaattcctccaaaattctcgcgtaaatcctccaaaccgaataggcccttagatagtaactgtagtgcttcagtttggtgtatcaaatatttaacagtaaaaaaaagtagtaattgtagtcaaatattttacaggcttaagattcagcttctgaagattaatgtgtaagaagatgtgcagaggtagaaaaactacttttgaaaaaagtatatatactcctatatcatatcacagattttgcattcatactgactccaaaatataataatatatggtttatgggaatgtaaagatgcaggctaatatatatctgcagttagtgcgaaaacatatcaatttcagaccataaaagtggctagcccttatccttccattgatccattcaggtgcagattttagattagttagactgttctaaacttctaataattcatcaatcacaatccatggttaatattcattaaggtgacctgccaccgaattagtgatagctcattggtatcatatccaagcaaaatgaaccacagttcaattaatctctttaaaccaggcgtgcatgattcaaagttagagatagaatagctcaattgaagttgaatttacataccgattgtaaatattattttgacattttcagaagatgttgttttcagtgactcattgtttatgccccagcatccaataatccatatattggatgtaaacatcatctcaatggcacatcaagcactatggggcaatgtgtcacacaattagaggtttgaagcaaccaatcatatggcaaatcagttctttttttccataagatgatctgagttcggagaatatatatcttttgcatcagcatatcccgttcaggcgttcgccaactgagaatatttgattgcagattatctttatattactattttttttgtcagagtacgttgaactggcaatagtagctaagtctttccttggaagttttctacaagattttcataggaattgcatcatcccatacaaaagcattaagcaactcccatcaagctgttcttgcaaatacttgaaatcgtcttaccgaattcctgaactacatgatttaagcagataattctaaatataaatttcttttttttagagagttagtggttttgtaaacaccagttattttttacaagttacaaacatgaattctactgtcaagcttttgatcaggaaagcataaacagagttaaacagcacagccatggttggaaacctaatgtatagattagcatctttggatatcagggtatcaggtgatcagggaacagaattccaagtgtccctgtcctgtccttttgaagctcatcatccaagctgattgatttggagagacaattgagctacttaacagtatgtagtaagtttggatggattctggagttgattggtggagaggaggccttaccaggaacagctactacattgggccagtgtattcttatccttctacacagtgatgatgcctggaaatagtttgcaggacacaatttggaactagagcaattctactgtccttgaggaggtatcatgaggtatcaaaatttacacttaaattttggtacctcatgatacctcgcagtacctaggtaccatgaggtaccaaatttacaatagaaaaaacggtacttcatggtacctccttaaggaccgtaaaattactcttggaactataatacagagatgtttcaacagtatgattcctaaaatctaacaacagaacaaacacaagatatatatttttatgagcacatggagagagaaaataatttgttaggattgcatgtccaacatagaaaaggagatccattgtatgggcggatttttggatgatccgtgggctccgaaaatcctaagatgattttatgggggctggaacatataaattttacaggatttttcatgtgaatcaattcaacacccttgaaaatactataaaatttgtttcttccaaggagtgtctagatcttgtaaatatcatgcgttagagaggaagcagtgattagactaagcgctggtttggatggtgccattttttccccctacaatatgaagatttgcttctttctaaaagcatctattctaggggtgtaagtgggtttacccgcgaaaccacttataggcaaaaatagtgcgtaacccgccggtttgactagcgggttaactatgaatttgacttataaattggtttatagatcgatccacttgtatatttaaatgcggcaagccggaccgcgacgcgaaaaaccataaattattatttatttaaactcacggatcggtccgcttgcacccctaagattctatcctaccaaatttgctactacaggcctatttggtagagctatatgaagctaggaaagtggtttcacccctcctagtatgtactttgtggggtgaatccttcactttaatttgtaaaagtaaagatctataggctccaactccaccagagaggatctgagagccagtgtcctatcaaatggacctttactattgtgccaaaggttcagggcacagccacaaaccacaaaccacaacaagaggcccaaaccacaaaatcacgtcccatcgaacacatgataaagcggaaataagtctattgtgcctctctcatgtcttgctcctgattaaatcgcctcccttaaccggcaactgctaaactggatataacacatcctccatcttgaaaaaccggtgaaaatcaactccttcaacggtttgcaaagtggtttctgctgacatggtacgttgatcgaggttgattcaccgagtaagtagcgggacccacatgtcatcctcatctcatcaccatcacctctcccctcccccatctctctttctccaggcgtcagttctcgtaccgttaaaggagtcgatttataccgatttccgttgatgggagagatgtcatagttatactcagttttacggtgtggggggggggggggagacaattcgatttggagctagagaaacggagtcaacaatagacttgttcccacaaaaggccccaatgtagacacggcccaacacgagaaacacccgcacccgcaccgcacgcgacgtgggtaggaaggagacggatgacgggagatgagtcgcgacttgcgacgttggtggcggcctcaccccactcacccagtcatcacccacctcatccatccatccaccacgcagcagccgttcacctcaccacctcgcgcggcgacgagacgagacgaaccaaatggaaacccgaagcgcacaatccgtgacctctgcccctgcccatagctaaccctaaacccccaaatcgaatcccccaccttccccgcaaatctcccaacccccccccccccttccctctcgccgccgtcgccgtcgccgcccggcgcctaggtaaaagtggatccctcttccgccgggcgcttctgagctccagatgattcgtgcgatcgatgcgtgtagttcttttttttttttgtcggcgtgtttgcttcgtgattgccgcggctcggtgtgagcgagggatttgttcgttgggtttgagtgattgggatcgtcggatacgtggagggagacgtttagggtttggttgggttgggtctgcgctgccgggggggattcgtctacggagcgaggttatcgtcccttctctgggcgttgtgcccttttagatttgatgatgatggttgggtgttccttgatattggttcgatgtagacgaatgttatagctctagggtttgctttgttaagctgtattgagatctgttagtgttacttcattcacatgcctcctattttcactgctatcaccgcctggtgcatttcctagcaattgctaatcaaacgttaattcatttcttcactctaggtcaatgcgctgtggaggattatgttttactgtatgcgtatgaacagccatgttggcattttgttgtatcacgattgtattctggattgtttttctttttactgttagactattgttgtgttaatctagaactgattaatgcggacacctcttcagaatacttatcatgaatggaatctgtgtgcgtacttttctaataaattcaattttccaccataataatattcatactcatgtgggatgtatcatttttacatagggattgcttttttacgaaattctaattcaatattttttttaattcttaaatctatgtatactggcccagggagcatctattttgatgtcctccacagtttgtatttactcctttcccgtttacggttctaagacctccattgcttcatatctatttcagatatatgtattaactgttctaagcaacacaactatttctcgtcaaggatcttgggagtttttgaaatagttgcataatggagttgtcaaatcaagggcagacacccatgtcaactaacatgggttctcaaccattgccttcttcaaatattcaacctaatcaggctgagtatccgtctatgttttatccatctttgcctgctgactggggtgcacagccaatgttttctatgggagcttctgttccaattagttcgtattttattgttcctatgagtcaacaatcggtccaaattggtgcttctaggccagagactccgcgttcttcaggggcacattctctaagcagagtatcattgaggccaccccagcaagtgctaagtattcgaacatctttgccaacaatggttggatcacaacactctcctgctggcaagaaactgcaaccgacaattgcttctccaaaggttcaaatactgaaatctacacagtcacagtcatcgaacaaacgttctgcacagaaggagacaccatcaaaggttcaaactcagcaattggaatctgtgagatcaaagttcagggagtcactttctgctgctctgagaacagattctgatcagagtaagaatcaatcttctgatgtgcagcctgatgggtctgcagaccaaaagaaagagatggatgtagatgcagatcaagtggccaccacatcccaaggcatgagtgcagccaagtcggaagtattgacaagtgttggtgctgagaggcgtgctgaagatgagaagttaaacagtgatttagtttcgaacatagccacaccattaaacgcggacatccagcaacaaccagagaatgcttctttacaagatgaaatgttgggacaatatacagttgttgctgatgaactcttgcaaggtcatggactttgttgggtttctgactttgatgctggggttcctgaacctgccacacaacctaatttaaaaaggtccagggcttctgacattgaccctgttgttgcagacactctctcagaatctgagtccaaaagaatgaagtctgccaatgatgaggaagcgatagataaggatagcattattcagaaggcagatgatttagcagttagggttgaagaggagctgttcaaactatttggtggagttaataagaagtataaggagaaaggtagatctcttctatttaatctaaaagataaaagtaatcctgagttaagagagagggtattgtctggagatattacacctgatcgcctctgttcaatgactgcggaggaacttgcttccaaggagctatcggagtggcggttagctaaagctgaagaactagcacaaatggttgtccttcctagtaccgaggttgatgttagacgtttggttaggaaaacacacaaaggagaatttcaagttgaagtagaagaaacagatggtatctcagtggaggttgagcttggaggtaatcttcttactcaagttccatcaaaagcccctgaagatcagaccaaatcagacgataaagaaagtacagatgataaaacaggcatacaagacaatgacaaggcacctgatgggacttcacaagatgaagataatggggcaggcaagaacgatccacaagatgatttagaatatgttgataatgagaaaagtgaccttatgcaagaacttatggtggatgacttgaaagacactgaaaaccttccaccgatcccttcactagatgaattcatgcaaggtttagattctgaaccaccttttgaaaatctctcagctgggacgccagaagaagattcagatgatcgagacgaagctgacactactgcagaatctgcggaacttcctgaggaagaagttaaagtttctgcagcagagaagattgtatctgaagctgacctgccatcttcgcaggataaatctgagtccaagttagagtcacccaaagatgaggtgggttcaaatttgggccctgttgagcagcgtgaaggaaagctgataaaatcctccccagatagtgttgaagtcaaacaaacaactactgaaaatgtgctgaatcgtgactctactgtgcataatatggcaactactcttcctatgatacgtgaaagtatatgggagggtgcaattcaacttaccatgtcttcgctcacaaatgtcgttgccatcttcaaaaggtttgtttcatctgcagccttttcctttgaattaccaatatacaatcgtttctgttagcataccatgatgatttgacacattctcttcgatgcctttgtcttagttttaatttattaaaagcagattagtgctttacagaacacgtacatcttcttttgcacaaagcttttactgaactgtattctgcaatttcatcttctacattgtattcgcttggtcgtattttggaaattgattgtctgttccttcagaaagatacttgttgaactatatggcatatgcactccttggcaaaacacacacacaacttgcatatgtccaagactcgtatgataactttatttatttatactccaactattctgtcctggtcttaagcttgagtaagaatgataagtttgggaggcaataaaagcataaatcgccatcactggtcattaagtaagggtcaatgaaattggggggctttcgttgaagatctcagttctttcgcgcctcaggcaagtgagttatggaagtctttcttcctcatctggtgaagctagctgctgttgtttgattccttgtttctattggtttctcaagaggctcaaggtcttgctctacctaaattactttaggtttagaagctagacatctagcatcaaattaagtaataagtaaaaactgatagctcatggcatgcaagtatataaatatatcttcatgtgagaactgctaagagtaataatttataattagcaagcactgccaaatgtgacatgcttcagtgtacttctcttgattccgcagagagtgcattaagtaggtgtatgtcattgagggtccagcttggctacttcacctctttctgatgggaacttgtatacttgtgtatttgttcgatttatgtcttgttagttaatactgatctaaatcatcccttttgcaaagtttgctgatttaattaatgttgataacaatttacaactggttcttcattgttgtggcccagaatgccctgctactgtccaagtacacatgatccactctacctgaaagatagtgttgatatgtgtttattctgtattttatttttgtatttgtgatgacatgtattaaaatttcactttgcagtggtgaaaagccaccagtaaaagaatggcggagctttgttgaaatcaaggggagagtcaaacttagtgcctttcaagagtttgttgaacagcttcccaaatctaggagccgtgctataatggtaatcttgcatttttcctgttgaaaactaactaatatgtttaaatgtctgaggtctgggtcaggatgtttgaaaaatgttggtacttatatgctaaatttgccaagaaaacaaaaagctatgaattggagcatgtgtcagccagaaaagaaaacaattgttacagacaaaaaaaacaactcttgacatgatctcttgcatgtattttaagtcttaacttttgaaatgcttcttatgattgtatgcttagcatctagaagtatcactctgtttgggagttgttactcgatctatcctttatttaactaaatgcctcaaactatagttagtgcgcttttgtcatcacagattatggttcatgctggtgttgataggatagtaattgaatatgtccaactttgttcataggtaactgagttgtgttggaaggaaggttctcatgagagtggtcgccaacatctcttgcaggtttttctatcgtagccctttttctttcagagaaagaccttccttcaggagctagcttaatgaatgtttgtggatttgatcattaaatttgtctattcttctgcagacaattgactcgtatatttcagatgaaagagtagggttagctgaacctgcagatggaatagagctgtacctgtgcccttctcaagggaaaactgtggagattctctctcggcacctgccaaaggagcatttggagagtcttgctgtgtcagcatcctccatcatcggggtcatcgtctggcggaggcccaacgttcccaggatgccggcacaccctaggcatgatggttcccggaggccgtcgattttaaagaaaccgcaggttactggttctactccaggccctaggccctccctgcctatgagctcgcacggcgcgccgccgggttttccagttcagcgtcaccgccacgaggaagatgtaactgatgatgtccctccgggctttggccctggtgttgctagggatgaagacgatcttcctgaatttaattttgttaactcgtccaatcctgctgctaatgtaacaaccacccaggcctacaagggccggcagcatgtaccccttacctctgctcgcccggtagagcaaatgagggaactggttcagaagtatggtaaaagatcatctgttcaggctcgtccttgggatgatgatgacgacgatgatataccagaatggaaccccaaccagcttgtcacccaacaacagccaacaaggcagctcccagttccacccacaccacagcaaccgctgcctccaccaccaccaccgccctcgcttcagcaattgcatcatccctaccagcatcagcagcagcagcagcagcagctttaccaccaccaaaatgcattgcaacctcagatacccagcaactctatcccccaggcttacctccgaacccagcaaccattgcagcaacttcctctgatgcagcagcagcttcagccagcgcaagcctggcagcagaccaatgcttggtggccggcgcagggcggcgccgccgccgccgctgcgccggcgagcatggtgcagcagtcgcagtatggtgtgatacccaacagtaataacagcgcgcaaagctatggttctgggagtgtgggtggaatggcatggagaccgagatagaacctgtaaaaccttgaaatttatgctggttttacaacctgcgagcgtccgttgtagggtggcttctctctttctctcttttagttcagcgattcaatgtaagcatgagtcagtcgtgtacacccgtacaggggatgtaatctggataaactagagatagttgtgggttgtattcataatcgtaggaaaagaaattttaaatcttcgtttcgaacaatagctcctctcttcgaaccaatctgttcgtagacacttcgaataattgattaaacgataataatgtaatgcaaagcagaatctgcttggtttaaattgtcaaattgtcaggtggcattcggtgcactagtggaaattgcaaagcgactattgacttgccagaagaatttgtggtctcacctttttcgtatcatgaatgatgttgatgttgggacaatgcatgcggtagtacagtgcgctaccatttctggaccttcccatctatggcaatgctttggtttttccccatcctattaagtggtagattcttttcttttcttttttttctttgaggggagattctcttgttttattgaagtaccataatgttcgtgtgttaccaaaaaaaagagaaaaaaaagaaaattcattcctctacttagaaactctacatatatatttttaattatatcatgttagagatttaatcaaaaattacttttaaaaatgtcaacattgttaaatatttggattgaacgcataaatatcaagcgtgcaaatttatctcaagcatatttttattatattcaattttatcagaacttttaaatatattttagtaccaatatttgctaaagtattctctaaagactatgccagtatctatgctcacaacattctgcgataccacaccataccagatagtctgatagatcatttcgcaataaagaaaattttgaactcattataaacataaatttgtgcttgtgggaatcccctagcgaacactgctgaaagcaaagatgaacgatacatgtttttcttgtgtatatgaaagtgttaactaaacagaacagaaagggggaaatgtttatttaagctttatattcttctaatttatttctcctgcacgattctatgagggacagcatgaacaagattttctctgattcagagactaattaggcataaaataaattctgctctttatcttaggtatgtaaattggtatgtggctcatgtgtccagctgtccacccttaagatgtatgtgtcctaattatttttcctccaactcactctggtttaattaattacttgtacgtttgctctctaggaatcggggagtgaagatgatgaccttgatgttggtataggtgatgtaccatctgagcttgaggttaagaattctggtctaatacctgcacaatctaaagagacagaaaggcagctttcgaagaaggaatggaagaagaaagagcttgcagaactagatactgtgctggctgagctggggatttctggacatggtacccagcttgatgcaattagtaaatgtatagaacttactcatggtgtgacttgtaccaaattaagaacatcttcactatttcatactccctccgtcctctaatataagggattttaacattttacttgcactgtttgaccatacgtcttatttaaaaaaaagaattattatttattttatttgtgacttacttcattatccaaagtattttaagcacaacttttcgttttttatatttgcataaattttttgaataaaatgagtggtcaaacagtggaaacaaaatatcaaaatcccttatattagggacggagggagtattcattaactattgtttattgatcatatgatatattttaataaacaagcaagtattttgatttttcccaaatttacagctgaaagaaagccagataagcagaatggtggtgataagaatggtgctcctgtaccttcagagagcaagacttcaaggaagaagaaatcaaagaagacaaatcaatcaaggattctaaagagcagcccaatgaaatggattccagcaaggaccatggagaggtggcggatacaaatctgaagaggaaatcacagctgtgtatatgaaggagaagatgaagaagatagcttcagccaaaaagaagtccggcagaggtggatggggctgcaaagcatgctgcaaaatggaggatgctgctaggagtgcaaagcttgctggtgcaaagaagaaagagaaaaccaacagcctgtcgatagatagactgcttccatcaccaagttcagagttcagaatgagcaccgggctcatttgttctacttggtctgtttggtttagattgctgaacgcacttctcatgaatatatccaccatatctggtaagatatgctgcccttatgtgatcaacattggagatttagtgaatggcaattgtgtcatcagcatgcagaaatcgtactcagtaaactcaggtttcatcggtgccaacggcttgacttctggatatatttgttgatgtcaactttaccaatggtccagcttatcaggtggatattggcttgggaacatccattttctgtcttagcctatagtcagaacatgctgccaatttttaggtcagattcctcgcaaaaaaaaaatagttagtattctgcatgtgccggacattttttgtggctttgttctccgcagttattatgaagtagaagtgcctggagttggatttgcaccaagaattgaccttaaattatgctttgccgtatgcagtcaataaccaggtgcaaagcagaggaaagaaagatttgggcacttcatcacgaagcagccagaaatgatctttgcttcagatacaagctggtgaactttctggcgttgacagagttggctctttcttaagtcagctttaagaattggcagcacggtgactctgaagctcatgaacaaagagtacgcagccaaggtatctcaattcttaaagtttttagtttgattcacctccctctttttcaagaggagtccttaaagaaatttcttcgcttttttgtcggcgttccaaaaaggcatttttgcctctcgttggaatcgaaacctgcagccctttcttcccatccactgtggcagtatccattcactagaaaccgtcgtttcgcctacagctattacaagctgtagcttttgttagcggttaaaaaatattccctttgtttcgtattataagtcgtttgacttttttataatatgagatagagaaggttgttcatatgaaaaacttttttatatgtattttggacgacttaaaattcaatggtacgattaaaaaaaatcaaaatcaactataaaattaacttttaatataaattctgaaataaagtatgataaaaaaaatcaagatcaatttttaaaataacttttaaattttaaagagtaaattgcacattggtctaggtatttttacctaagtttcaacatggacaatcctaaagacaaagttttcactttgggccagtttcttttaccaaaagctttcactttggactggatgctctcacatgtcagtagatcaggagataagagaggacgccggcaagcttgtgatggagatgattggattgtggacgtcggcaagcttgtaatagagattattgcaatgtgacaacacctagatatgcgaaggaagttctgcacgcatgaaacgatagcacacatctcgttctttcgtcatgtcatgagtgggtttagccatctctacctgaaccgtgccacaccgcgcatcaagaagttgtttgaattgagtgtcatcacaatccaatcataatatctacggcgaggtcagtcacacatgcccaagttgtgaacataccctgccccaaagtgcaactcttggcaattggcaaagaaacatggtgtaaagtgaaaatcttgacttagccctagcccaatatgaaacactggtaaaaaaaatgtagtccatgatgaaatttactcaattttaaatttgagctgggggctactgagttgaggagtaaccgatggcgctgactgaaaaacatcctcatcagcttgccagtttcagctggcggattcagcagctgcccgggttggattggaggacgtcgccgtcaaacggcacacgacatggtcgccttccgtgggacctcgtgccggcaacggttatccgttgggcgccccaaaaaaaaggtatcctgcggcgggcggttgctctcgcgcgccatttaccggcggcgggttttcggatcagatcgtcgccgttcgtcgtcttctggtttacacatcgtcacttgccgctgcagggatatgtgtgatgtgtctacagggtccactttgaatccatttggctcatggttttttttggtttgtcctgtccgtgtcttcaagagggaaatgtcacagatgattgccaaaatatcatccgaaagctggctctgtcaattgtctcggatattactgacatcattattctatttttgggatttgtaaatttaatcagtgacatatggtaggggtggtggtatttttctttgggtgtagctatatttatggcgccatattttttatcaaaaaataagtttagcagtaatatgcgggatttttctacagaacgtgttataacccaaacatgtatatgcacatgttcagattcaccgttaaaaatagtttttttatagagcagaggaagtatatatatacaacactttaaaaggatttcagcaagaatatgaatttattataatcttttgtctctttaaacatgttctaacccccttactctcctgctctctgattttgaatgcctgatagtcccacagttcattagcctacatatcacgggcctacatgtcagcgtcctatatcaaaagaagcttcttccgtgcagtgtacacacgcttgatgctgtttgcatatttgaaaagaaaaaaatagcgttcaatttgtggatgcacggaagactccaatgagcttatctgcttatgtgaagtaaacaaacaaaacagagcttatgcaaaactgatcatctccatctcggatcatcgtatatacgaaacgctgagctttaagtgtacaacacaaacatatacactataaaaattgcgcacaaaaacgtatacacaatcgcgcgcgcgcgcgcgcatatgtacgtacgtacagtgtacgtttctgtacgtacattacttgcacgtatcgttatacttcgacgcagcacgcggcctgcacgtaccccgcgaactccggcggcgccgcggcgcgcgcccacgactgcgccgcgccgttcttgtcgccgccctccccggtggtgagcaggtacaccgcctgctcgccgccgtggctccccgcgccgatggcgaccacgcggccgtccccgatggcggcgagggccgtcaccgcgcggccgtcctcgggcaggctcgccaccgcccgccacgcggcgccgccgttgttcgtggcgtcgcgcgccgcgaggtggccgtcgcggagcatgtacatcgtcgcgcccgccgcgggcgccggcgcggcgcagcacgtcctcgggcacgtcccctcgtcgaggacacgctcctgcacggggccccacgcccacgcggccgggtcgaacgcctcggcggagccggcgaaccggccctgcgcctccgtcgggtacccgccgacggcgacgaacctgccgccgacgcagacgcccctggcctcgtcccgctccgccgccatgtccgggagcggcacccacgcgtcggcctcggcgtcgtacgcgaccgccgaccgcagcgcgttcttctcctcgtcgtgcccgccggcgacgaacacccacctccccaccgcggcgcacgcgaagaacgaccgcctcggtccaggcatcgccgcgccgcgccgccacgacccggacaggaagtcgtacacgtgcaccgcgtccgtcggcgcccacgtctcgggatcccacccgccgaccaccaccagccgcctcctctccccgccgcacgccgccaccgcggcgagctggcagaagagcggcagcccaccggcgccggggagcggcggcagcgcggcccagccgccggcgacggggtcgtggaggacgaggcggtaggaggtggacaggccggcgtacttgttagccgggccggcggcggcgagcggcggctcggcctgggcgagggcgaggagcgggcgcgccatgccgcgggccctgcggaggcggtggtagaacggcgactcgacctccgccttccaccgccgcgacgtgctcctcgccgacggcagctggtcgaatcccacgcgcagcaggcattcccgggccacttcctccggtagccccggaatcagctcgtcatcactcatcgcttaatccgatcgcttcttctctattaagaaattgaaaattgagaatcagagagtggaactgtggattagtcaagtggagatgttggggtttgggaatagagggagaggtttaaataggcgggcaaaggagagaaagggattcgggagaggtcggagtccgcgggaacgaggcgtggtgcggcagtgttttgggggagggggggggggggggtgggaattgcggcgaaccgtttggtttgaggggaaccgggggtcgcgtcgcgtcgcgtggttttggaggtgtgttttaatttgcgtgtgtttctattgtattcggcggcgcgggcacacggttgggtcagggggaaaattggatgcaaatgaggagtcacgaaggcgcccgtcgcttaagattttcttttaacccgaatagatttcaatataacttcgtatttggattgggatcctctattacagtactctctctctctcccataatataataaactagtatcggatgagatatttcatagtacaacgaatatactagataagagggtgtctacattataatatgaaatgtctcatccgatattatgttactataatatattaatatattataggagtagcatgtaaatgtaatacggcagagaggtacaatatatggcattagggatactgtgtatcgttggttgtgtgattgatggttcggatgatctgctacagtaaattctgctgtaaagcaacatctactatactgtagctacagtagagcgctgatgctcaatgcattcgttcactgttctcctcacatcaccaatgttgctcaacattactgcagagtaactggattcatagtatttactctataaatttcaccatcaatttacacatcaatattaaaatttgatggagtttttgccgacgagccactgccggctggtatgactaggctatatgtgcgtacaaccacaagttttttttaatactgtagtaaaatttatttcgattttttagaacacagtacaaacgtaaacgttcatatactcacttctataaatacacatatgcacaccatattaaaagattggattggtatatcttaatattgatgaaatcaacacggacatctcattgtcaacaattacattgcctagcaataaaaaaaataatcagctataaatttaaacatttagaaattcagagggaaattctatcacaagaaacctaatcagttaaactattgctcacttaggttatttctacttttgtttcaacgaagctatggccaacccgaagtcttgaatgtatacgtcgatttatgtgtgacaaagttgttatggcttggttaacttcatgatccgttcctctctatgtactaccctagtcccttggttcaaatgatcttgctgccttatgttttgtatgataatctatccacatagtagaatgtgtctcatctaattaaaaacacttatattttagggcggagggagtagtagatagctttttttataacggtgctagtattttctttctatgtttaaatttatagtaagaagttaattcctttattttgatgggaagagtacagagttgattctgtttaccggtcaataaaaaaataccggtaccttttaagcataccagttattcctcgtgcccatccaactaatcgatcaggataaagggtgatatttagtggaccagcggagtgaccgaacagacaaaacagagcagagcaaataaagcaaagctctggttaacttaactgtaactgcaagtgcatccattccattaacccatttcctcccaaatcgacgtccgtcgcggtcggagccgcggatcgatcagatcgtcggcgcaccgccctatccactcgttcgcgacgccgccgccgtcgacgagcacatgctcgcacgcgcgctctcgatcccgtttttacagagagccacacagagtcacagacacaggagtgacatgtcactgtcactgttacgcatcgagtgtgactgacgagctgatttgagccgatcgtgcagtgcaaattgtcgatcagattgggcgttgggagcatcaatgcaattgcaccggctttaatccggctcgttttttggccgctggtgtagcttgcaggatcgattgcagctagctactagctcagatattaatttgggggattattttcaggatcagtcgaatgtaacgcgctgttcacacttcatcacacacataattgacaaattttacagggacagcaagatggccaagacggcaagatcaagttctttatcaggtttggatcgatgatggctggctcgtgtgtccaagcgcaacgttgttgttatttattcgtgagactgaccggagaaagaaataaaaaagggagatctctccgtcgtatttactcgccagtaatgtgccgtcgcatgacggcgataagaatttcagtattgggcctgtagttcagtaatgcaatatttttgtggcagaataagattcagttcttttttcttgattgaagaatggaagaggtcgttgattttcgcctaattgtaatatcatttcacatttggatggtcatgatatctggtttatttactcgccagtaatgggccgtcgcatgatgacgataagaatttcagtgtcggagaatgaactcctccaccagggaaccgtgaggcccccctttgtgagttcggccgagggcagcgggtgagattcaaggattcggtgagcgaagctgtgtgatcttgagggggttcaatccccaaagacgatgagacaaaaggggtttatacaggttcgggcctactcctgtgtttgggattatggtcaagtgtagaacacaagtgcctggggttgcgagactcaagcgccagttcgctcggaagtccccccccaccactaggcctggacctccttttatacctcaaggggttaccacatgggcccaacaacctaacctagctccggtggagaagtattataatctttgcattaaatgcatgtcttgtctcttggcttgggaagccatgcgcacgtcgtcttgatgatggggcctgtcaaatcttgccgcctgacacggggggtgcccctgtcagtcaccatttaatgggtgaagacttctgggctcctattacaccgggaaacgggagccttgctttgaccaaagcgggaggaccgactccggctgggataagaggatgagaacctctcaccatcattatttgatgggatatgtcgggctgcacgtcgcctgacacaagcgatggtgcgcatgacatcctgggtcccatcagtcattcgaccggtcacagaccggttgagtgcactgcataccgcattaaatgcggcgtggcgcgaccgcttgggtcgccattaatgcgggtaggtgggcacctggaggcggacacctaacccaccgtacgtggtgacctagatagggggtcgggggagtccgacacctagtcacgggagggggcggtcgccgcccgacctcgggcccgatctcccctcgggggagggccacgtggcgcctggggcagccttctccctctagtctcggccagggaatggccgccaccctacctcgggcccgatccccctcgggggagggccacgtggcattggggggcagcctcctccgtccaatctctgggagggagtggccgccaccccacctcgagcctaactccccttgggggagggccgcgtggcattgggggacagcctccttcgactagtctatgtaggagtggccgccaccccacctcgggcctgactcccctcggggagagccacgtggcattaggctgccccccaaggccacgtggccctcccccgaggggagtgaggcccgaggtggggtggcggccactccttcccaaagactagtcggaggaggctgccccccaaggccacgtggccctcccccgaggggagtgaggcccgaggtggggaggcggccactccttcccaaagactagtcggaggaggctgcccccaaggccacgtggccctcccccgaggggagtgaggcccgaggtgggcggcggccactccttcccaaagactagtcggaggaggctgcccctcaaggccacgtggccctcccccgaggggagtgaggccggaggtggggcggcggccactccttcccaaagactagtggggggcactctaaacatgataccccgggcccatatcaccgacagtagcccccggcgttagccctgaccaaaccctttcccaggtggtcagggttgacgccaatcttctagtcagttgacatgtgggcccgatcttctatcctatcattctgggagttgggcggtgggagtttagtcacgttcatacgttgccttaacttctcactttcctcccggtttccgaagcgctgtgggctcgggagtttagcacgtaccttaggtcgtgaacttatttcatgtatatactcagcaaacggttttagattctctcgggcccgtgaccttacgccgcgtacctcgcttgcccctgccttttgttaacctctgttggtgttctactttatctattcaaacgattattttcgcatgagtgtgaggactgaacttcccatagccagcaatctttacccgtgatcaagccaggctgggcgccgtagccagccggtggggccaaagctagctgctacggaagagccagcacagggggccccgggcgtcgacggcgaccaaagctcgacgcagggctagaatagagctaggaatcgtagcccccacacttttagcaaagaatcatttgaatagatgaagcgaatacaaactttttgttatcaagggaggcaagccagcgcgcgacacatgggtaccgcgggactacgaggaagagatgggcgacagataaatataagcaataataattctatgcaaacgattatcttcgcgcgagtgcgaggactaaattttccatagccaacaatcttcacccatgatcaagccaagttgggcgctgtagcgagccgtcagggccaaagccagccgctacagaagagccagcacaggggggcccaggcgtcgacggcgcccaaagctcgacgcagggctaggatagagctaggaatcgtagccccagacttatagcaaagaattgcttgtatgaatgaagcaaacacaaaccttgcttgcatgtcacgacctttcaaacctttagctcgaagagagccccccaccatgggttccgaaccatcttgggaagcctgtgatcacttagcaaacgaggtcaagttcccacgagcctgtgtccccacgctacacattctgtttgctctttcctttcggtggcctccttccaatatctctcccttctacacggacgactacttttgcacgagtgtgagagccgaaaaactctagagccagcgatccctgtctgcagttgagccgggccgagcgccatagccagccggcggggccaaagctagccgctacggaagagccagcacagggggtccctggcttcgacggcacccggagctcaacttaaggctggaatagggctagaaaacttagcccccacacttggcgaggaaacgttcatgtagatgagaaagaggttgggctcttaccaccgaggaagcaaacgaatgcgcaatacacgagcgtcacagggccatgagaaaagaatgggggaaaagaaatataagacttcaagctgtattaagctgatgaattgaaaaattgaaaatacttgaaggttgaaaggacgattagttgagccgggccgggcaccatagccagccggcgggaccaaagctagccgctacggaagaaccagcacagggggtcccgggcttcgacggcacccggagctcaactgcaagagtcctcccaagagtagaccgaggcaggcagcaggttcatgagccaaccccgcgcttggcccctgagggtcatggggaagaagctccccatgatctggtcatcaccccccgccgcctctatgatcgtcgtgcagatctggagggactcggaggggttgacgccgccgtcgtacttctcggtgaggctgggtcggaactttaggggccatcggacattccgaagactcgccacaaaggcctggccgctagccttttccggtgaggaagtgggaggcctagccccctgcctagggtggcgcggctctcccgaggaggctgcgccttcccccgcatcggcggtgtgacgctcgtcgcgccggcgctcgaaagaacctcaaaaatcacgaacacacaccctacctggcgcgccagatgtcggagaatgaactcctccaccagggaactgtgaggcccccctttgtgagttcggctgggggcagcgggtgagattcaaggattcggtgagcgaagctgtgtgatcttgagggggttcaatcccccaaagacgatgagacaaaaggggtttatacaggttcgggccaactcctgtgtttgggattatggtcaagtgtagaacacaagtgcctggggttgcgagactcaagcgccagttcgctcggaagtcccctcccccccaccactaggcctggacctctttttatacctcaaggggttaccacatgagcctaacaacctaagctagctccggtggagaagtattataatctttgcattaaatgcatgtcttgtctcttggcttgggaagccatgcgcacgtcgtcttgatgatggggcctatcaaatcttgccgcctgacacggggggtgcccctgtcagtcaccatttaatgggtgaagacttctgggctcctattacaccgggaaacgggagccttgctttgaccagaatgggaggaccgactccggctgggataagaggatgagaacctctcaccatcattatttgatgggatatgtcgggctgcacgtcgcctgacacacgcgatggtgcgcatgacatcctgggtcccatcagtcattcgaccggtcacagaccggttgagtgcactgcacaccgcattaaatgcggcgtggcgcgaccgctcgggtcgccgttaatgctggtaggtgggcacctggaggcggacacctaacccaccgtacgtggtgacctagagagggggtcgggggagtccgacccctagtcacgggagggggcggtcgccgcccgacctcgggcccgatctcccctcgagggagggccacgtggcgcctggggcagccttctccctctagtctcggccagggagtggccgccaccctacctcaggcccgatccccctcgggggagggccacgtggcattggggggcagcctcctccgtccaatctctgggagggagtggccgccaccccacctcgggcctactcccctcgggggagggccgcgtggcattggggggcagcctccttcgactagtctatgtaggagtggccgccaccccacctcgggcctgactcccctcgggggagagccacgtggcattggggggcagcttcctctaactagtctttgggaaggagtagccgccgccccacctcgggcctcactcccctcgtgggagggccacgtggccttggggggcagcctcctctgactagtctttgggaaggagtggccgccgccccacctctggcctcactcccctcgggggagggccacgtggccttggggggcactctaaacatgatacccccaggcccatatcaccaacattcagtattgggcctgtagttcagtaatgcaatatttttgtggcagaatgaaattcagttcttttttcttgattgaagaatggaagaggtcgttgatttttgcctaattgtaatatcatttcacatttggatggtcatgatatctagtttattcaacttgttagtatttagatgaataagcaaaaaagaaaaaaaaagagtgagaggattgagcttcaggtaggtattcatgtccggaaaagctatctagcgcatacgcgcctacgacgccgccaaacggaggcccgtgtagacgcgatgtttcttttttctttttttttattggcgttgtgacgtttttttattcctttttttcttttttttcccatggactatatggcgttgtcacgtttttttttcttttttcgcctttgactaccgcacatgtataggagtcaagattaaaactttcaacttaagattttttgaatttttcaactcagatttgaaaactttcaattaaagatttaaaaactttcaactcggatttgaaaactttcaattcagacttgaaaactttcaactctgatttgaaactttcaactcgaacttgaaaactttctattcagacttgaaaactttcaactcggattcgaaaacttttaactcaaatttaaaaaatcaagtcaagatttgaaaacttttaactcaaatttaaaaactttcaccttcgacttaaatttgaaaacttccatctcaaaatttaaaacattcaacttaaatttaataaacattcaactcaaatttaaaactctcgactgatattaaaggtgaaagattgaatttgtaaaatattgaaaaaaaattatgcgcgcgtgtggagaaaaaaaagaaagagatttaaaaaaaatccaaaaagcaccaaaataggagatcagagagaaaaaggaaagcggctgccgtgcgtgcgtgctagcagcccctttttttttccatgacgtgctagcgttaatcccgcgtgcgtcacttaatcccgcgctaggagctctcatttaggtcaggtgtaagtagctattgctacggttggtttttatagtgagatgtagtgatgtactactctgaatttctctttaaaccacttatgtgatagcactattagtaatgttcatccatgcctctaaatctctcttgacttgctagaatgatgattcggccgtattagcagttgccgatctcaacaccaacagcttcatctgagtaaattctattatgattctaaggccaaaaaaaaccttgaaaagtttgctactacaccgtaataataattacctacttgattacacatagaattattggataatctggaacagaggaacaaaggattcaaccatgaacaattgcacagaagagatgcatccatgatactagtacacatgggagggcggccagagcacctgttcgttccccgtgaggaagaacttgcgatggcggcgatccatgtcgtcgatgagcctggtgatctgggcgtggagggccctcgtccgcattgcgttcacgcacctcctccgcaagatctccttcagccaggggtcgtcgcaggccaccatctccccccacgtgttgtccttgagcgccttcgcacggagctccgcctcctgccgcaaatccgactccatcctccggtcctccgccgcgcacctcttcctcccgacgatcgccggcaccggcgcatctcgtccacctccatgtccgtcgccatgctcgcaagctgatcactgattgggcctctcgatcgatcggccccggctagcaagcagatgggtagcagcaggcgcagatcaggcgatgggtggtctgcgacggtgatgaggctattcaacgatgccaaattccttatacgatcgccggttgatatatttatagtgcggggcgctcattctatttcggattcggattcgaattctgatccggactcctagccaaagccgctcggacgctgactcagactcggtacgtgtgtgacctatcaaaataggtagtaacatgttatccataaaattggattcactttgtttactttgattcaaaatagttatctactctctttgttttaggttataagatattttgactttggtcaaagtcaaactactctaagttgaactaactctatagaaaaaggtagtaatatttacaacaccaacatagtttcattaaatctataatttaataattttttataatactactagccttgggttaaaaatattactacttttttctacaaaattagtcaagcttagagtagtttgactttgaccaaagtcaaaacgtcttataacctgaaacggagggagtacaatattatacttaacaaaaaaagagttttaaacgaaggtaaagtatattgtcaaattgctatttagctatcaaagagctcaccgtctgggtcttgtgtatcaaatgccttatttgtgaagggagaaatagggcatttttttcacggaattagaactagtttgtatgaaaaccagtcaaatttgtgttctagagaaggtctaaattatgttagttcttgttagctaatcatgtcgcatggcacatgccaatgttacttgagtacttaatatctcgcatcaggtctgccttgagctaccaattgtgttcatatcttggtttacttgtgatcaccagcggtagcgctcatgaaatagagctgtaatgaaattattttacatctccatcctctgttatgaagcgcgcacacagtcaaaagggattaaaaaacagagtgagacacctaaatcaatgaaaaaaatgatttaaatggtacttcaaaacaaggttgcagatagttgctccagttatatacatggatctagacatcttctagttttggttttcatttggtcagcattatggcctgggatgaaaaagaccatagtaaaacatgttctccgaacataaacccaatttccccttaacatgtatccaagtagaaatcaggcacatactaataaggatgatggatctgagagaaatgcataagaagcataagtgcatggtctttatttcatgaaaaaaagtacttgcagagaaataggacttaaaaactcaacaagttttcttttatctggagggatcgttccttaattactctcctagtcgcatttcatacttggcatttagttgtcctagtggctgaaacaatttcttctaaccttcctcgtcatttctttctaccgtcaattgtcttccccttccccttctcagaactcttgttctccttgcctttccccttcttctccgtgttggacttctcataaccctttcccttatgatcctcagccttggagctctcatatgacttcttcttctcagaagatatctgagacttcacctcccatttcttgtattctctgatggcatgttcctttcactctcagactgcccctctctccttttttttcttagttgatgacctttccctatcagatttatcttctttcaatgccatcctttcttcccttcttctttccttcctaatgatcttcttttcctccaacttttgtctcttaaattctgctctcgaatcaaactggaccgggtgtctttcaagaagaggtgggtgctgtagaggctgtgctgtagctcaaggatttgattcatcgaagattcaactctttctcgctagccttgcatgaggccagcaacatcacctttcgcctctccaactcatttacctcagcttgcacttatttccacggcaaacctttcatatttagtttggctttccactttgtagtgacgacaaattagtgagcacatcaattttatcatttactatttttttatgataaatttatataggttgactagcaaacatgccaacggcacaccgattttctacactatatatatataaccggagcaactaactgcaaccttgtttcgaagtaccatttaaatcatttttttattgatttaggtgtctcaccctgtttttttaatcctcttttgttaataactttattgactgcatgtgtgcctcacaacagaggatgagatgtaaaataatttcattacagctctgtttcataagcgctatcatagtcgaacgagcaatccaaagatatgaccacaattggtaactcaaaacagacataatgcgagatatgaagtgctcaagtagcattgacatgtgccatgtgccatgattatcatgacgctttaagaactaacataatttagacctccttttgatgttttcaagtaagtaattattattacggtgtagtatttttgatgttttcgtttttgccttgtaatcacagtagaattcacccgttggtgttgatatcagcacggtcgaatcctccttctagcgaggtatggatgaacattagtgctatcacataagtagtagaattcactcggatgaaccagttggtgttgatatcagcacggtcgaagcctcattctagcgaggtatggatgaacattaatgcttatcacataagtggtttaaaagagaaattcagagtagtacatgttactacgaaaaccgacagtagcaacaaatacttacacctgacctaaatacctgatgctcaatactttcactctttttatttttgtttatttatttaaacactgacaaggttgataatttatattatataattggcagctagcagaagagagcgatgacctatataagtcgtatcttcttgctagagaagaagatgaacaacaaacactgtagaagacaatgaacacccatttggcgaagatgaagaacaatgcgctggagaagacaatgaacacaaatggtgggggtgataaacgagtttctactttaaaccagagtgttgggaagatttactgtgacatgctggataattactgtgacattcttatttgaaattttaaagttttcataaaatattttagaaataaaattatgaaccattattttagttttgacaaatggacatatatgatattaaagaaacattttatggatttatatataaatgatttatttgttcactatatattctagactagagttatatgggtagtaccgaatatgcgtagtatatttaaaagagggaaaataaatataaattcattgtttcagatttgttttttcttaataatttttgttttacactataattctagagttatatgagtagtaccgagtagacgtggtatatttataggaggcaaaggagtagaattacatgtgattgtaaatagaagatagttttggaatcctctggaatccatatgtgatatttttatcataacatatgattgttaggtgttttttccctagtataaatttataatttttcttcaaagtaagaggcgccacgtggatcaatcgaaagctaacaaaagcgcaagctaatagtaccgagtatgattagtatatttaaagaaagaaaatgagtgtaaatttgttgttttagatatgtttttttgcttaatatttttaggtttactatatattctagagttaccggagcggtatcgagtaggcgtgttatatttataggaggcaaataagtagaattctgtgtgattggaaagagaagatagttttggaagcctctggaattatatttttctctagatttttcctcacatatgattgttaggtgtttttttttctctagtataaacttatgttttttcttcaaagtaaaaggcgccacatgcaccaatcgaaagctagcaaaagagctagcttttagattattagaagatgtggacatcgtcatagtttcagttttcatttcgtcaacattatagcctggggtgaaaaagaccaccgtaaagcatgttctccgaacaggagacccaattttcccttaacatgcttccaaatagtaatcaggcacatactaatctatactttctatataattatataattagtacccactaacaattgatagaagctaaagttcaatatgcaagcatgcaacatcatcaccgactggcaattactattctagcctatttaaaatcccatgcaagtataccacatcttcactcactagcgattactattctagcctattttaaatcccatgcaagcataacatattatctacaatattatattatatctacaatattatattatagagatcaacaagtatatgtcaaataatcttcctaacattatttttttaacatttcaacttttatcatttcgataatatttaatatatatctataaatctcgcagcaaagtgcgggatatcacctagtaataacttaataaaacacagtaaacctcaaaacatctaatcaaacaactgattcaaaaccttcattaccctctcatgcatccaaagagaacaaaaacaaagatgaattcatctatcactacatgccaccaactcaaccacaaaggttctagaaccatcatcttcccttccccccaaaataaaaaaaaaataccttctttctgttaggccccacctgtcggtgagacagcgcggagacaggaatcatcattagtcagcgactcagcgaaaacccaaaaacaaaccaagaccagaccagaaacgccggtgaaggaacagcccacgtccagctcacacacgcacccacaaccgacccaaccgccactgccatgtgggccccacacaccccaggccccaccaacccaccggctgccgccggtcaccgctctctcggttgaccggctgcctaaccttcgccttcttctcccaaaccccccacgagaaagggaagagagaaaaaaaggtttaattaaaagttttttttttcagttttattattattacttacttacacgcgcagcgaagcagccagcgaacgaaagaggcgaagccttcgcgtcgccgctcgccgccacctcgtcttccgctgcgagatctcgcgcgagcgccgccatcggaggaggaggcgcgtcggcaggtgagtgctcgccgattttggcggtggctttgctctaattgtgggcggatctggctgggttggtcggatctcgagccatttcggtgggggatatttttgtttgatttttttttttgcggcggtggggttttagggtttgtggcggcggcagcggcggccggggatccgggcggcgatggcgagcaggctcaaggaggacgagaggaacgagcggatcatacgcgggctgctcaagctgcccgccaacaagaggtgcatcaactgcaacaatttggtgagttcccgctggctttctactgttcgcttgctaaatgtggtaggatttcggcggggttggctaggatctaggggaagtggtttttgagctcgcttggctttatacttcagcgttgctagtaatggcgagggttttagagctacccgcgaatgtttgcggcatactaggagatctcattggctggctggataggtaggtttccgatcggatagcggtattttattaggctggttgatactggatcacaattcagtaaattgggacggagagtaatgcgtggagctattgctggatgtaatgccatgccctgtaatcacacagcatattctttttcatgtaattaattatgtagacgacaaatgttgctactttctgccagatatacatcacgcgttacgacttaggactagaacaatggccaagaggtacctaagatacaagtatcaagaaagtaatggcgcttatgagctgctaaagtattcttatctttgcggaaaaacggattatgagcgtctcaaagttatcatgttcatatctttgcagtcaaagtcaatggtgaatgtcacacttgcttacattgtctgtggtgtgacaaaacaaagcagcccttcaaaaagcagcacaagcagaaaataaaataaaaagaacacctctttataattgaattacaacatgtggaattttaataaatccctagtcgaaaaacagctttgacatatactctttgctattatagttgatgaagaattgaagatcataagcaaaaaaaattagaaaccactatggtcgtcttggaccaaaacgtgtattttgtgacattctggcacttgcaaggcagtacatgctactccctccttcccaaattgatcatcatgtaatggaattcaaaatttctcaaattgatcatcatataaccgcatggacacggatttcatcataatacaattaatgcagcatgggagaatgtgtgcatgctaaggtgtaattggcatggtgttttgatcgatgcatgcattgtgggagaatgcgtgcatggtgtcttgattgatgtgatttaaattatccttggtcttggtgcataaacatatatgatgatcattttgggaaggagggagtaatattctactatataccaagattgttaactctccagatgatgtctaaaaattcacgtgttgtttcaaccacctgaatagcttagttgaccttgcgttcatggatgtttaatattttttcccttctgtttatgccctaaactctgtcgtgctaatacatgcacatttgcacgctgcactttaggctctatgcatttctttaagcttgattttttccttttctttttctgctagcatagtatctgctatttaaggcaaatagcattcttgacttgactgatctgctagttgttttgggcattaataatttaccacagctatcaataaggaaactatattatcatggcccatttggatgtctattgttctggcagttgacttcaccttttttactcttttagagtatgccaattagtgattgcttctattattatgcaaaataaatgattttttttcttaaactgctattgcaacagtggggtcctatataattagatgccatcagttgttgcaaatgttttctactgttggaaaagcatgaatcatctgcagtccacatgacattttcactacataagccttttttggtagttcgtttattactcgatctacagcgcaatgaggttatttggaaatctccaactagtcatcacagcgagccttgcctaattttctctaccacaagtagaataaattactccctccattccaaaatatagtaactttcagctatgaatccggacaagtaaatgtctagattcatagctaaaagttgctatattttgggacggagggagtattatgctttctaattctatggtgcacccaaaataatgtcaaaatctatcatttggaacttgaagagttttgcaatatgtgtactggagggaatcggcagtagaagcagctaggtttgcctaataatgtcatgtcaagattatggaggattgcactccactcttgcaattaggtggactctaagatagttcaagcttatatttatgcccatattttgcttcagcagagtactccttgcttaggtgctccacacatgtttttgttgggaaagtagacttaattagtgggtatttgtgtaatactgatgtgcattactttgtttcctaattttttttgtatattactgaatcacatatattgatattaacagggaccacaatatgtctgtacaaatttctggaccttcatttgtaccaattgcagtggagcacagtaagattcttattcagttctgttttgttacacttgtaatatgtcgaacctctctagcttcactgtccctttggtcaaattagatgcattttagtgaagtcagtgatcctaattttattgatgacaaaatttgttttgcttctagccgagagttcacgcatcgagcgaagtcagtttctatggctaaatttactgcacaggaagttagtgcccttcaagaaggaggaaatgaggtgacttgtcctctcttttctttttcatgttttctaccattttaggcctttctaatttgacatgtgttttgcataacctgtagcgtgctagagaaatattcttcaaggaatgggatgctcaccgcaattctttccctgacagcaggttacctttctgtttagccataccatatttagattacaacttgtttcctttatcttggaattctgacctgtttcttttggtctcagtaatgcggataaattgaggaactttattaagcatgtttatgtggaacggagatacacaggagaaagaagtgcagatcggccaccgaggggaaaggtgatatgttggctaattataactatccttgtttttttgcagttgccattgcttgttggaaattgctattatactatcctaaattcgttatttccttatttctttgtatcttctaggatgataaggatgagtatagtgaaaacaggagatctgatggaaattggggtggttcaagaagtccgccatacaatgaaagctattctgatcgtcgcagttatagtggaaggagcgatgacagaaattccagatattcctatggagaacgaagtcctggctatgaacataatgattataagaaaagcccccgctactttgaagttgatgatagaaatcgtgaggatagatctggaaaaacaactccagttcaacggtttgaggaccgcaggccttctgaaccacagaggccagataatgggtctccaaattaccagaaggaaaccgatggatctagccctgttgtacggccagtgagggatatactgggtgataatgcacctcaactacgggttggtgagcctcctaagccaaatgtagcgagaacgattgatcctccgagaccaatcgatcctccaagaccgattgatcctccaagaccgattgatcctccaaggccaattgatcctccaagaccaaatggaaccagaaccatcgaacctccaccacagatgcaggttattattttcctctgatgtttcctttttttttttgcagacattgcttttagaaatatcaccatgttcttgtctccatttccacgttaagctgataattttatcagtaggttcaattcattagcttacaatacatacttcataattgtagaggacatcaactgccagcagtattggttcttcagaggggacctccgaacagataaaagtggcaagtacgataagtttaattgatttcagtgctgatcctgagccttctgcatctgtgccacctccacaatctacacctacatcacaacagcagcctgctagtgcacagccagtgcaacctgttaatgcaccagcacaacagcctgctgtggaacaagggaaaaatgtgtcatcagtgagcagtggtggtggtgactgggcatcgtttgattctttcggccagcaacaaacaccacaaactggcaatagtgtagatccccttgagtctgcacttgctcaactatcattttctgaaacaccctctgcacccaattcatcagcttttccagcttcggtcatgcccacttcagttccaaatgatggagggtcatccatgatggggcagtcacattcttcattttttggtgcaccccctggagtctcaggtcaccaggtacttccgtttgcagaggaatatcagaagtcgatctgtgtaccttccatttctttttttgccttgaaataggttttcacttgatacttttcttaggcctcaacaggaatgtctatccatggatcttcagttcaacaaactggtctagctgctccggcagctggacttccgttccaggtctctgcgaattcccgagcaactagtggcattcaagaagcagcacctaatactgacagtagatccattggccggaaagaacttccagcggtatgtgattaactgcttgtagagaattgaacatctagcattgcagcattttctagtccctgcactactgacttgtttcatcttccccacccctttgcttcattggcttcatttagatatgtaatccgttaatttgtatgttctacagtatagcttgtgcaatatgcgatgccattttctaaacttattgtaaccatattttgtgaatcataaagctgaaattaccaaatttgtggacagggcatagaaccaactacttaccagattagtagcacaaccgttttctctttgacgctttagaatccatgttgtaagttgcagaggaactgcattattttatacctataatatataggatagcagtatgaggcactttgttgttgcctaggcttccaagtcgatacctgttggtgtattacctataatatataggacagcaatatgctttgaggttcaggacttatgatatggttatcctcccatgaactaatttcatgacatataatcactgcagtccaactaaattgagtactagtcaatatgagttcttagttcggatttcacttaccatatgcatatggggtacatttcatacccaagctccaaaattcttgttgagcatatacatgtattggattatagatgtgtccctagatattcaggtgcctttaataatttacataaagttacaaaagttatttgcagtgtcgtgctgaaattttatggagttaaaaagtgtcagataaaaaaagaacaggagtacatgataaaaggtatagagctcaaaactgctaagagactgacacttacagtttttctatggctagtatttccttgaaatcttgtcaaataatgtaaggtgtggtggcccaaggttaaatgatgatcttttgatctgtcagaggtggtatttctgtttagcaagcattagctaactgttaatacgttggtaggatatatcatttcctatgcgatcagttatgttggtttaaaactaggtgagatttgttgattgtttacatattaaattgcattttaatgggggttacatggttattaacttttttttattgagagatgataatatatgcatgtaaaacaatgcatggtatggtagggcaagagttgaataatggtgttaataattgttggtgcatttgaatgtgatatctgggttgactaaccagatacatggaaataaatcaggttatcgagtgaaaaagctaaacaggcattcaggtcatcattatgcaaaaaaaggaaaaaaagaaaaaaaatatatagctattggtttgagtctatacttccagtaagtaataagtagtgatctgagtcgcccattcatgctggttgtgaccaacaatgcttctcagttcatttgtcttttcgttgtacccctatttcacttgcaagatcgtttaaactaactttgaattgaggacaactgtgcgatccttttccttttctgtgaaaaatggtcatattagagaagaaaaaaaaacctggtggggccactaatatgctccataaaatcattgtgtcagcatagttgacccttagatcatttttttgcaggatatctttacttcgttatatccaccaggacctcaaacaatagggggttggcagagaacaccccaatttggaatgggatatgccatgccatatcagactgcaatggtatctatcattctcatattagcgatttattgtgtatctgatgttgatgtttttcctaactagataaattatttaccaattttagggaatgcaagcatatcctcagatggcatttgctcaacctgcatatcaacaacctgtatatccgcaacagcaacatgcatacccccaacctgcgaaagcatcaaatccttttgatcttgggaatgagccagctccagttcaagctcacacggtatgaatgaagagaatgaaatacctcttttacaaaatatctcaaactaagatcgtttcacttactattcttgtaaatcttgaggtatcttgtctattaattatgcctgattgtttcattaacattgtgatattcgtgtaaatgttggtcctcttcctctaaaaaactgtcaagtgcattagttttatacttgatgatgcactacgatagtgcgaccatattgtttgtacccttgagcaatcccgacctggatcagctggtatgactcaccatctttgtttgctccattaacatggttaatctttgtgtccttgagcagcagcagcccctacctggaccactgggagcatctgctggcatgactcccccaggtttacttggtacctcgagttttggagtccttccacagcaacctcagcagctgtaccagtcacctgcacctccaagtatttccatatctcagcataatctctgaaattgtgctctttattagtatttcttatctgtgtgctaatttgtggttcaacttcagatcattacatgatgcagcaagttccaaacatgtctgagcagttacctaataccatgcttccaatgtgagttgactgctgtatttagtgtatctcctaagttgaaagtgtagtgaagaactttttagcatttttttaaagatactttttgctcgtgttgattttttttttctgccatttttgttgtatcttttgggatgtaggagtaggaagtagcatgcaaccttaaaatagagactaattattaatgagtccattcgaccagattggatggttgacatcaaccactgaaacccgtagctttcagaattatctcacctttgctctactataaacaatagcatccaccttctagtggcatgcccattgtttgtgtcattaaaatctggtactgcaaccaaaggcaccagcctttgcgttggttccgttgtgttatatcattctttcattttaagttttagttcctacaagacgtatttccgtcctaaaatacttccaaggtgttggttccattgtgcaattttttgttgtttcgacgcttatgtccaagttgtggcattacaggcaacaaggaggtttgggttccctcaacatgggctttgatcaacaagctgctcccaggtacccccagccaagcaccccaccttcctatggctctgttgggggaaatccttttgggtaaggtcattatacaatcgacgtgcgatattatctgctcttttggagttcttgtgcatcatcggacaaagggtttgcagtgcccagcgggatcaggaaccatactagccctcgagagaatttgttaattcatactactggttgtgtatttatccgctgtagttggttgtacaactcgtttccacaaggacaatggtcgagcgtaactgcgtctgagcataagctccacccttcggagttcttgatgcgcattccaatagtgtttgtatatttgtgtttgatgcggttgcaacatgtatatttgggaaggatgaggcctcggggcctcgaatggttttttgactttcttttcggattctccatggaccatgtgcaaatcatgtattcttattggcccaggttgtttatttacccccagtgcagttggctattaaaatttatgtggatggtaataccggattatggttgatatgtataattgtgtaaggtccatttttggaatgttgtatgatactcaggacaaaacgaaacttctaagttgttttcaccatattgtatgtacctgaagattcttgtgctttctcaaatttttgggtcctcgagaaaattttttaaaattaaaaattttagtacctcgagaagatatcaaattttacactatgatttcttataccttaatgatgataaaattactccacggcaagtgacgtaaacaagcatggtatgtgatcagtgcgtgtcaggtgctaaagatggcggcaagcagaatggcaaataagttcttttaaagcagaatttcagtctgttcatgccatactagtgtcgaaacaatttttgttgagtacgttcacaagtagactttccctttggttatcaagatgattcatgataggcccaacaagaagagctgaaattttacaaggctatgacgtttatatcaatataaaagaatcactcttgtatctaaacttttattattcactaataacgctcgcaaggaatagcacaaatgaaatgatacatagctcgcacaaagtgttgtcttgcagattgcatcaaagaaacattctggatccagcaagcatacttttaccctatgtactcttgtgtaaaatatggatcctctttagctaatcaaattcaacctcaacgagaagggaacatccccctgagaatccacagtaaggacctatgtgtgtaaaaaggtacaaaattttctatctcaaacaaggacaaagcgatgactaatttctgtgggttttatcgtcggatatgccgatcttaaagcacgcccaatgattatacaagtggaggaaaacggccttcacatagtttcagtaggagtcagcaacctgtcaaaaaataattagctataataaatgaatagttgttaacaactgtcgctaattgtatagatggaaaaacacttcacctttacaagctgaatcagtgtatcaggttgctgtcccgctgattcactattggtcaggagtcaatactgcaaaaggcaagacagtagttagaaaacatcaacaactaatgtatagcaagcacaaaatttgctcctatgttcaaactgtctaagaaaactggtcagaccaacagattaactcgaataccaaaattaaattatcccggcagattaaactaaaggatatagcccagaataaacacttgtatccagaagcaggtaggttttctttctttctttcttttctttttgaggacaccagcagcaagttttcactatgatcattggtgccctgggaggagaaactaggacgaaaaaaaggttttaggactgtacacttgctcaactacagcttttatgctaatgattcttcattgttcgtaccccactgttcctcggtatcatttccgttcacaaggacagtaccgtcagtcgaaccatcagcttcaacatcaacctcaacagcatcttcttggctctcttctactccattttcctcgatagcctggtggaccagattgatattactatattacaacttaaagcaaggagaaaagaaaatataatgaatagcaaaaaatgtgattttattgaaataatgatcactttaaaagattggtgataaatataggacatcgcatgccaaaaaaaaaagagatcagtttagtagaagtaatttaacatcttcaaatagctacccactatttaacaatatttttttacaactctttctgtaagagtgatacctcgtgagtgtcatctccattttcatctggcagcacctcctcttgatgtatacgcatatttttgaaagcttccaccagagtctcgttaggcctctcagcatggataatgtactccttagctggtgcataaatacccctatacaaataggatttcatattacaataaagaaaaagtacaaatgagcactgacattacttctatttatttcactatatgtgctcaactgaagctaaatgtgatattccaaaccagcatcccatacatggtagagggcatcattcttacttcatcagatgctttcaattaaagagaagaggaaagcaaaccatgacggcttgtcccatgtgtggaagagagaacaggtaaaactttcacaaaagaacatagtttttacttttacaaacagaccttttgggcgcaacattagcttctacattgagagcaatttgccagtcttcaaacaagtttgggtactcgttgggatctgccaatgattctgccgctttggggtttacctataaagaaaatggcacgagaatgaaaaaaaaggcatggtaagataataaaacacatatctcctacaaattaaacagtgtcgcgtagcgcaagtctgaaaataagaacaatactctagcacaagattgattgtcttttggttagttttgcatgctagctcagataatagacaaaatgcccttgaatgcccatgatttatcaggtacacaaaatatagattgggcattctgcctgttaggatggaaacatcactaaaaatcatcagtattaacaccagaaactgggtaccttttggagggggaaaaaagagacagatggtaccttttggagatcctttttccataatgttacaatctcagggactttgctcggaagataagatctcgacatcaatgctgcttctggtatacgattactgtatagagaatataacgtgatcaccataaaataaaaaatacattttctgaataagcattgtactattaaataggatagtcttggcaaatggcaatacctttcgattaacaattgaagacattcttccagttttccaagcatgaagaaacaaaggaaagcaacattgttcttcccttgttctttagccatagatgttaattttgttagcccttcagcatcaccaagggatgaatacagaagtaataaaccactgagatccatagcatgtagaagacactcctctgccatatcaagctgcagaattgacacttgacatgttagaatatgagtgcactcttttagccagttttgtatctggcaaggtgctgaaacataacatggcaaagttattaaattgcaagaattctacttaaaactaagatggtaagttatttttttacacacagaactctgccatcaggcaaaactattgttttgcacgcataattctacttttaaaaacaactactccttccgtttcatataataagtcgttttgactttctttaaaaaaatcaaacttcttgaatgtttaaccaagtttatagaaaaaatatagcaacacttatagcaccaagttggtttcattacatctaacattgaatatatttgaatagtttttttcttttgtgttaaaaatattgctatatttttctatagatttcgtcaaagctaaagaagtctgacttagaaaaaagtcaaaacgacttataaaatgaaatggaggtagtacaaaagatggacagagcaaaagcaaaggcacaagaacttcttaggttctaattcaagcatcatagcaacaatcaaagctacttcccatcaaaactgcaatattatctcttcacaaatgcctttgttaaattatatacttcttctgtccaacaatataaacatttctagactgttgagcaaagattaaagttgaggagaaagtactttagtgccctcatttaatgagaaggttggggttgaagagtagttgggcgtaagatgggaagaaatttaaatgaggtgattgattttacatatgcattgtagaaatgcttatattcatgaacaaaattcaaatgcttgcttatattgttgggaggagggatttatttctgtgcgctcataattattaagttacacggtatactggtactaataatcaagaaactaaaatgccatggcagaacagtcccacttaattagcacaatatatatattgaccactcatagaagatacttcctccgtttcatattataagactttctagcattgctcaaattaatatatatgttaataaatctatatatatatatgtgtgtgtgtgtgtgtgtgtctagattcattaacatctatatgaatgtgggcaatgctagaaagtcttataatatgaaacagagggagtagtaactaatacatccaacagctgtacctttccggttgacatagctaactctcctaactgcctccacttggactcactttgtgcctcaatggcaattgcctgaaaagcaaatagttaacaacatttgaacaaagacaaaaacattcttggaaatgtgataaataaattaatcatctgtgcctttgcaacttcaagccgaccaagctgcacggccaagtcaaatctgtaattagagtctgttgctatctcaagggcttcttccaacatgccccgtgattccaagaaacgtgccacactgcaaataaaagggttatcttcagattctgaggcctgagttgcagagtacaataattagcagaacagggggcacctgtcatgttgttcttttggtatagatggtaaaagagcgtttgcacgatcgaagtctccacgcattacaagtgttttatactcaatcatagtaaggagtaaagtataccccacaacactgcagtaagaaaacaagttaacctcagaagttcattgtggcttccgaatatgatacgataccagacaaccaagactcacttaaattgcttgtcaataaggtagacacggctttggttagcaagatatcccagtaaatacatttgccgatccaagtgaaataaggttgtgacctgtaatacatcgaatagttatactacctctgaaaattaacagtctaaccaaatcatatgtgaatgcatttttgatataatgaaaatacttacctctcctcctacacagtaattaagtcgtgacgaagaattgttgtagataaaacaatcgccaacccataggccagttcggatgcgttcattgatctcatgaagtagttcaaaggcatcttccacaccttcctcgccaactgaaccccctccatccaaatgagaagaaactacatccctctggaaggtataattgttgtgttatagttacatcaagtagatgttacatcattgaactacagagccaacaaaatgcagaaaaacttacattgtacttcaaaatgtagaatgaggtgtcacttgcaattgtcactaaatcaccactatcggcccaatagagattctacaaataagaaagcagatcctatttagcatcataatattccaaatgacacgcaaaaaaaaatttaaatccaggaacaaaattactcactttcacattgacatcaattctgcgtatcatcctgccctctgcccagtcatggaagcaaataaaatcatttgtacacatagccagcaatactccaccaaatatacgctctgcagaaaatggtggtcttatactctttctctcctgaaatagataggttttatcatcatactatgtttcagaaaccacagtaaaggagattgttgtgataagcttggcagctgcctaataaatataagtaacaagttgaccctgacacagtagaagaataaatgattcataatgccccttactcaagtcacattttagtattgatcagtctaccccaactactataggcaatattgctcactcccatatccctatccagaaggagttggtcatttactgattttttatattctaaagaaaaacaagaataaaactaactttatattatgaaaccttcagtgatattaataaattgtagatgatttttaatggattttctaattgtgattagccaaatgtgaaaaacgatttgaaacaatggatatgttatttgaagatcgacggtggtgatttataaatgtttcatgagatattcatttttttattatataatttgtggtattctattcatgctatattttttttgaactacttgcaatttttttttggcaattttatttatattggaatgtgcacagtactccagcttgtccatgaaatgtgcacacctactaaatttttctagccccacacattgcattgaaggacccctactctgatgtacaacgataattaaaagaaggggcagtgggcagtacaaacctggaaatttttactgtatatctttatcctcgaggtgctttctctgacagcgtattctccatcaagtgaccaaacaaattcaagtgcagacccgaatgatctatttctccatgccaatgcggtgtagattatgtattctccatctccacatacaacaacaaatcttccatttggattgtgccttaaactctgaaatgaatacactattattaataacatgcaaacataaaccagaacgtagaaaagttcatcacatttatttaacccgacaagtacaatttcaaaaccggcactccaactccataattacactatactagatttgatattaatttaattttactataacaacagaatctccatggtgtgtttaaataaaacaactcaccagtgcaaatgtcaaataaactaacatattaaaatatttcaacatgcatggtcaaatggtgtatacatgtgactcgtgtaatgaataggaaaaagaaacttgggactcatttgcaagcatcaagttggttctattggaaaacatcaatatgcgaatgatgcattcgtttaaatagcaaatatgaacttacttgtggataaagatcacaggttcccaactccttcacaaccaagggtaagcgctcaccatctgcaatctgaaaaatggaacaggttagtaaacaagacgtataagaaagtatacaagttttcaacatattagcatggtgaacaagaaaacctcattgtctgcaccaatagtcttgatattaacagtttggatttcattatgttttgaccatatgatttttccactgctgtccatgctagcaacaggaacttcacggccaatttttatcattattgtcccttcatcatatccgatcacaaccctgcacaagtcaagttttttcccgtatcactaaattaacttgaaaaggaagaagttaatgaaaacatgaaaagaaaagggtttctgtgaagagcaaattgtggaataaactgtttagcagacaacgaaaaagtttatagctacattggagagaactatggagcagagaacatatacgctaaactaatcaaatctttatactgtgattcattttgggtgtgggaaacttcaatagcacatgaataggtgatatttagtatcatggtacttgacattaaccgtaagtccatagcatccgaatagtaagagtgtaatatttccaataccttcttgaacccttcatgtatcctaaagcccacactcgctcaaggccatagttaagagtgttctcaagcctgtaagaaacaagcaacgtgttattccagtctacagtaagattaaaaggatccaaaacaatgattgacaaaaatggaacaaccaaagcagtcttcaaaaaaaagagaagaacaaaccaatgcacagagataagaacatcttgccaggtgccaactaagcatatgcatatatagtaacctataatacttattgaagacagtgtaattcatgtaactaacaagcatagtagctacgcgtaagtgaatgtttgtggcatgggcgtgatgtgcatcctggtcgcaccccccaaaattgtttatctatatcctggtgtagaatgctagtttcaaaatatggcaagagaatctccttattttcaacaccacaggaaaatggtagcttcaaattctctggacacagtgcttcacttcagaggtcaccaattgttaggaagtggtatagttgcatatttctcttagtttgaccctaaccatcactaccagctctgatgccaatcaggacaggtttaatagaaaatattcctcttagctagtcgtacttcaagctataaattgctctatattgttactaaaataggactgagttgtaatacaaacttatgctataggagtaaatgtaacactttcactcaaaaatttatatttagattaaagaatgtaatgctgcatcaatcaaaattacatggctaaataataaattactaaatgcacaaactaattcgtaaagaaacaaggacatgaagaccagaaactatgcttgtaaggtcatcaatagatatgacacaccaatgattatttaagaaccagattttatgccaccgaacagagtttttattgccatcaatagaacaacacacccacgagagtaacgagtacatgaatttatctcaaaattcaaactatgcatgaagtatcctatgagttgtatcatagggggagagagcgagagaacctgtaggtagtagagtgccacaagcgaactgtcccatcctcagagccagtaagtattataggtaactccggatggaaacaaacagcagagacattatgtgcatgtccttcaagcgtttgaacacagctcttcgtttgatagtcccaaacctgattcaacgaagtgtctcgtaacaatgtccaatatactcacaagataattcactgcagatggcataccttcgcggtctgatcatcagagcctgtaattaagtatgggcgatcaccaccagtaaagtaatcaacacaattgacaccttttgaatggccatctaatgtgaaattaggatcaggggaaccaagactccatacctgaaattaaataagggcaccacattcaaatccagaccaagaaatgttagaaatgcaaaaactatgccaagcaaatgtaaggaacaaaatcgcaaacctttactgtgcgatcaagtgaagcactagcaaaagtattggtatctttcgggttaaatgtgacttgcataacatagtgagaatgcccctcgaagatttgagtgcacatccaacccttatcccaatcccaaagcttgatcagcatgtcatcagatgatgacagcacaaaaggctgggttgggtgaacagccacacacctgatgtaatccgtatgagcttcaaaaaccttgaccttatccatcgtattgtaattgtacacacgtatgaacatatcgtcggcaccagcaactacccattgtttccgtgtgataaatttagatgaccgaactgaaatggggatgattatattagcaagatggtatatcaaacagaagtaagcgatgaggtgggaaagcatacctggtaactctgtgacttcaaatgatttcaccatcgtctgaggatagatgaatatattataatcagtttaactttaagagtaactatgctgaaaatatgtatgtttctttttccgtccatcgatttctagattttacttttatgttttacctcctcctgttttgctctaaatagtttgcaaacctattaagaagtcccaattatgtagctaacactcacacatctgaaacaaccatctagaagttcattgactccttgttacttctattttgaccatattcctttctacaatgcatcgaagacttcctcgctaggttttaagaattcatcattcatcgctatgtttgacccccccccccctctttttctttgttttctttccgggctctggtacaacttactatgagcgcatatcgtcaaagtttactactacaagcacactaaatccaatgtatcttgaattttacatatggatgggaatatccattttgcagtacaaaagctcagcgtgctggtagtagataatcatcatttcataaaatccatgaaaccagcagaaaatgacgaattaagctactgtgaacagtcatgtacctgcgtctggtagttccagatgcaaacgctccctgaatacagactcgacaaaatcctgcattacaccggaggaagttattcatgtgactttgaacaacataatcattacatcactagcaccccaaaacccaaaaatcatgtcacacacacaaacttgcccactcaccatggctcggtcggatgcagatccacggacttggccctctccgacctctgcgcgagcttcctctgatccaaccaccaaacacattcagctaaacacaccaaaacaaaccaaactaagctaagcagatccgagggagaggcgcagtggttaccttgatatccaacctgagcggctgccaacatcacagccatcgccatttcgccgccagagaaaaaaaaaatcacacgaaagcacgaacgagaaggcaatcacgtcagtacgcaacaaacaaaaaaaaaccccagatccacgcggaattcgacgctccagccaccggatctcggcacggcacggcacggcaccgcgcggcgcggcgcggccgtcaaacggttcgccctcgccgtaccgatccccactcgcggcgaaacctaagcagcgcgagcctgggggaaggcgagagcgagagagagaggggagtcacgtaccattgtgacgcccgcgacggccggctacggcggggacgcggctgttacacaacctccgccgccgttcaccgccggaatcaggctagatctgatcggagttgaggaagagagtagtatcttcgaaatcgctcaagatcgagaagcagaggaactgaggaagaagaagttagaacagagttgtcgggggaggagagatgtatttctcatttctgtttgcttatatactagttgttggcgcacaggcctaaatcctcctgggctcgcaggcccactcacacatgaaagtctatatctcatacactcgtaacagtaacagtaccacccgccaaagtatcagcttgtccccaagctggcgcacaagggaagggattcttcagtactatctccaccccaaaatataacaacttttggctattaatcttgacaaatagggagtacgtcatagtcttcccaagttgcatgatcggctggcagcgaggtccacttgatcaacacttgcacatgagcagcattcgagcagcattccccttcttaacaagccgacgattaaggatctctgcaggtacaacttcaactgcatccagaaccacaagagtaggcagactaccgaaaacaggtgtgtgagccggcacatggggcttcaactgagacacatggaaaaccggatgcaccaaactgtgatcaggcaaaccaagacgataagcagcagtgccaaccttctctagaatcttggaaggcccaaagaacttgaacgccaatttgggatatggacgattgaccatcgatgactgaacatacggctagagtttcagaaagacagattccccaactgaaaaagcacgttcagaacgacccttgtcagctttgtgtttcatacgtaactgagctctttgcaattgctcctgaagaaaagctgagagctgatcacattcaaatactaaatccatccacagcatgatgagttgaagacaaagaacaggaatctgattggagtggggattagtaccaaagaatgctttatatggtgaacagcccatggaggtgtgagaagaagtgttatatcaatattcggcaagatggagccaatgatgccacttgtgaggagaagcctgagtcatacacaacgaagatatatctccaaacattgattcacacgctcggtttgcccatcggtttgtggatgatacgcagtactcatttgcaactgtgtgttccaaactttgaacaaatctccccagaatttgcttgtaaatatcatatcccgatcagagacaatcaagtgaggaataccatatgttttaaacacagaacgatccatagttgtagccacttgagaggctgtaaaaggatacctcaaaggaatgaaataagcatatttagtgaaccgattcacaactaccagaattactgaatagccatcagatttaggcaaaccctccacaaagtccattgagatatccatccaagcctctttgggaacatgaagaggtaccagcaagcctggcaacttgcaatgttcactcttggcatgctgacatacttgacactgcttaataaagttaacatcagttttaagcccagtccaagcaaacaacttctctagacgatgataagctgtcgtgtcgcgccctgattttcgttcgggattaaaaatcattaaataaatcatttctagaaattatattaaaagttaaagcaatttaatcaagtgaattattgagggaattaaaaattttctttaaaaatcatggccgaaaatatttttgtaaaattctctatgttctaatttactctctgaaatttcccgtgaattttcagagctcaaaaagtaattataatagtacaaacatcaattaatcaattaaattaaatagaaaaccatttaaaatctcttcctgcactttgggccgcttccggcccaaaggcttcatctcctcccttggcccgcccgcccctccttcctcttttccctatcgggccgccctcctctcctccttcctctttgggctgtccatttcacgttcctctctcggtctcctctctccctccctcgccgacaggtgggaccggtgacgccacctgtcagctcctcctcctacctccggtctcctcgggccgaaaccgccatggtcactgcacccgccccacgctgccgcttcttccgcgcctcctcgcgccctctctcatgcgggcccggtcgtcgcacactactacacctcttctccacatttccccaaattctggcgcctaatcgagctccacttcgcccatgtcgtcgccgcccaaatccgcctcgccccagctccctttcaccctcccgagcctataaaaacgctccccgcacctccctctcatttttccctagttccctgagcttgtcgcatctcctatgtacacactggtctgcaggctgcagcagcggcggtagcagcaaaggcagggatccaacttaacagatgaagttgcatgggcttgttcctcctattctttcctcctagccactgtcgctgttcttcatgaatcatgatctctatttttgttttatactgtttcttgtaattaattcctactcgcggtctctctcttcctagtcccccatttttctggtatactattttttttgtttaggggtgctctttagtgaattacctgtatcatggcttcatgggagctggttcgtgtaacatgaaacagaaaaaaaaaaaggtaatgttcggctggtttaacattttaccctatgtactttgtgtaaaatatggatccggtttagctaatcaaattcaacctcaacaagaagggaacatccctcgtatatataaagcatcctgagaacccacagtaaggacctatgtgtgtaaaaaggtacaaaattttctatctcaaacaaggacaaagcgatgactaatttctgtgggttttatcgtcggatatgccgatcttaaagcacgcccaatgattatacaagtggaggaaaacggccttcacatagtttcagtaggagtcagcaacctgtcaaaaaataattagctataataaatgaatagttgttaacaactgtcgctaattgtatagatggaaaaacacttcacctttacaagctgaatcagtgtatcaggttgctgtcccgctgattcactattggtcaggagtcaatactgcaaaaggcaagatagtcgttagaaaacatcaacaactcatgtatagcaagcacaaattttgctctcatgttcaaactgtctaagaaaactggtcagaccaacagattaactcgaataccaaaatgaaattataactgaaattatcccaacagattaaactaaaggatatagtccagaataaacacttgtatccagaagcaggttttctttctttctttctttctttctttttgaggacaccagcatcaagttttcattgtgatcattggtgcactgggaggataaacgaggaccaaaaaaagggttttaggactgtacacttgctcaactacagcttttatgctgatgattcttcgttgttcgtaccccactgttcctcggtatcatttccgttcacaaggacagcaccatcagtcgaaccatcagcttcaacatcaacctcaacagcatcttcttggctctcttctactccattttcctcaatagcctgatggaacagattgatattactatattacaacttaaagcatgaagaaaagaaaatataatgaagagcaaaagatgcgattttattgaaataatgatcacttttaaagattggtgataaatataggacctcgcatgcaaaaaaagagatcagtttagtagaagtaatttaacatcttcaaatagctacccactatttaacaatattttttacaactctttccgtaggagtgatacctcgtgagtgtcatctccattttcatctggcagcacctcctctagatgtatatgcatacttttgaaagcttccaccagagtctcattgggcctctcagcatggataatgtactcctcagctggtggataaatacccctattcaaacaggatttcatcagaacaataaagaaaaacaatacaaatgagcaccgacattacttctatttatttcactatatgtgttcaattgaagctaaatatgatattccaaccccacatcctgtacatggtagaggacatcattcttatttcatcagatgctttcaattaaagagaagaggaaagcaaaccttgacgacttgtcccatgcatggaagagagaactggtaaaactttcacaaaagaacatagtttttacttttacgaacataccttttgggcgcgacattagcttctacattgagagcaatttgccagtcttcaaacaagtttgggtactcgtcaggatctgccaatgattctgctgctttggggtttacctataaagataatggcatgagaaggaaaaaaggcatggtgagataataaaacacatagctcctacaaattaaacagtgtcgcgtaagtctgaaaataagaacaatactctagcacaagataacaagcatgtcttttggttggttttttcatgctagcttagataatagacaaaatgcccttgatttatcaggtacacaaaaattagatggggcattctgcctgttaggactgaaacatcactaaaaaccatcagtattaccaccagaaaggactgaaacatcactaaacatcactaaaaatcatcagtaatgccgaacagaaatttcatgcttgaatatgtaacttaggttgaagagacaagtcacgctaaaatgtgagcaactgagcacgatctaatacaggtgtgcaaaagattaagcatgagaataggtagaaaaaaacaaagaaatattataggggatagggcagatggtaccttttggagatcctttttccataatgttacaatctcagggactttgctcggaagataagatctcgacatcaatgctgcttctggtatacgattactgtatagagaatataacgtgatcaccataaaataaaaaatatattttctgaataagcattgtactattaaataggatagtcttggcaaatggcaatacctttcgattaacaactgaaggcattcttcaagttttcctagcatgaagaaacaaaggaaagcaacattgttcttcccttgttctttagccatagatgttaattttgttagcccttcagcatcaccaagggatgaatacagaagtaataaaccactgaggtccatagcatgtagaagacactcctctgccatatcaagctgcagaaagtaatttacacttgacaggttagaatatggtgcactcttttagccagttttgtatctaggccaaggcgtggaaacatagcatggcaaagttattaaattgcaggaattctacttaacactaagatgataagttatttttttacacgcagaactctgccatcaagcaaaattattgttatgcacgcataattctactttgaaaaactactactccttccatttcatattataagtggttttgactttttttttaaatcaaacttcttgaaagttcaaccaagtttatagaaaaaatatagcaacacttatagcaccaaattagtttcattacatctaacattgaatatatttggatagtttctttgttatgtgttcgaaatattgctatatttttgtatagatttgatcaaacctaaagaagtttaacttagaaaatagtcaaaatgacttataatatgaaatagaggtagtacaaaagatggaaagagcaaaagcgaaggcaaaataacttcttaggttctataattctagcatcatagcaacgaccaaagcgccttcccatcaaaactgcaatattatctcttcacaaatgccattgttgaattatatacttcttccgtccaagaatataatcatttctaggttgtttagcaaagattaaagttgaggagacagtactttagtgccctcatttaatgagaaggttggggttgaaggctggttgggcctaagatgggaagaaatttaaatgaggcgattgattttacatatgtattgtagaaatgcttatattcatggacaaaattcaaatgcttcaagtgcttatattgttggacggagggatttatttgtgtgctcataattattaagttacacggtatactggtactaataatcaagaaactaaaatgccatggcagaacagtcccacttcattagcacaatatatattgactactcatagaagatagtaactaatacatccaacagctgtacctttccggttgacatagctaactctcctaactgcctccacttggactcactttgtgcctcaatggcaattgcctgaaaagcaaatagttaacaacatttgaacaaagacaaaaacattcttggaaatgtgataaataaattaatcatctgtgcctttgcaacttcaagccgaccaagctgcacggccaagtcaaatctgtaattagagtctgttgctatctcaagggcttcttccaacatgccctgtgattccaagaaacgtgccacactgaaaataaaagggttatcttcagattctgaggcctgagttgcagagtacaataattagcagaacagggggcacctgtcatgttgttcttttggtatagatggtaaaagagcgtttgcacgatcgaagtctccacgcattacaagtgttttatactcaatcatggtaaggagtaaagtataccccacaacactgcagtaagaaaacaagttaacctcagaagttcattgtggcttcagaatatgatacaataccagacaaccaagactcacttaaattgcttgtcaataagatagacacggctttggttagcaagatatcccagtaaatacatttgccgatccaagtgaaataaggttgtgacctgtaatacatcgaatagttatactacccctgaaaattaagggtctaaccaaatcatatgtgacaatgtatttttgatataatgaaaatacttacctctcctcctacacagtaattaagccgtgacgaagaattgttgtagataaaacaatcaccaacccataggccagttcggatgcgttcattgatctcatgaagtagttcaaaggcatcttccacaccttcctcgccaactgaaccccctccatccaaatgagaagaaactacatccctctggaaggtataattgttgtgttatagttacatcaagtagatgttacatcattgaactacagagccaacaaaatgcagaaaaacttacattgtacttcaaaatgtagaatgaggtgtcacttgcaattgtcactaaatcaccactatcggcccaatagagattctacaaataagaaagcggatcctatttagcatcataatattccaaatgacacgcaaaataaatttgaatccatgaacaaaattactcactttcacattgacatcaattctgcgtatcatcctgccctctgcccagtcatggaagcaaataaaatcatttgtacacatagccagcaatactccaccaaatatacgttctgcagaaaatggtggtcttatactctttctctcctgaaatagataggttttatcatcatactatgttttcagaaaccacagtaaaggagattgttgtgataagcttggcagctggctaataaatataagtaacaagttgaccctgaaacagtagaagaataaagtggttcataatgccccttactcaaatcacattttacagtgcaaaggatattaccatttgaaatatgatatgttggcacgagaggaatataggagatcatattgagtattgatcagtctacccaaactactataggcaatattgctcactcccatatccctatccagaaggagttggtcatttactgattttatatattctaaagaaaaacaagaaacaaactaactttatattatgaaaccttcagttatattaataaattgtagatgatttttaatggattttctaattgggattagccaaatgtgaaaaacgatttgaaacaatggatatgttctttgaagattgatggtggtgatttataaatgttcatgagatattcattttttcgttatataatttgtggtttcctattcaggctatatttttttgaactatttgcaattttttttggcaattttatactaatttctattggaatgtgcacagtactccaggttgtccatgaaatgtgcacacccaataaatttttctagcccacacattgcattgaaggacccctactctgatgtacaaagataattaaaagaagggacagtggtagtacaaacctggaaatttttactgtatatctttatcctcgacgtgctttctctgacagcatattctccatcaactgaccaaacaaattcaagtgcagacccgaatgatctatttctccatgctaatgcagtgtagattatgtattctccatctccacatacaacaacaaatctcccattcggattgtgccttaagctctgaaatgaatacactataattactataattactaacatacactataattacactatactagatttgagattaatttaattttactacaacaacagaatctccaaggtgtgtttaaataaaacaactcaccagtgcaaatgtcaaataaattaacatattaaaaatatttcaacatgcatggtcaaatggtgtatacatgtgactcatgtaatgaataggaaaaagaaactcaagcagaaatttgggactcatttgcaagcatcaagttggttctggtggaaaacatcacttgatcactatgcgaatgatgcattcatttaaatagaaaatatgaacatacttgtggataaagatcacaggttcccaactccttcacagctaagggtaagcgctcaccatctgcaatctgaaaaatagaacaggttaggaaacatgacgtataagaaagtattacaagttttcaacatattagcatggtgaacagaaaacctcattgtctgcaccaatagtcttgatattaacagtttggatttcattatgttttgaccatatgatttttccactgctgtccatgctagcaacaggaacttcacgaccaatttttatcattattgtcccttcatcatatccgatcacaaccctgcaaaggtcaagttttttcccgtatcactaaattaacttgagaaggaataagttaatgaaaacatgaaaagaaaagggtttctgtcaagagcaaactatggaataaactgtttagcagacaaggaataaatgttattgctacattgggagagaactatggagcagagaacatatacgctaaactaatcaaatctttatactttgattcattttgggtgtggggaacttcaataccacatgaataggtgatatttagtatcacggcacttgatattaaccgtaagtccatagcatccgaatagtaagagtgtagtatttccattaccttcttgaacccttcatgtatcctaaagcccacactcgctcaaggccatagttaagagtgttctcaagcctgtaagaaacaagcaacgtgttattcctgtctacagtaagaataaaaggcctaaaacaatgattgacaaaaatggaacaatccaaagcagtcttccaaaaaagaaaaagaaaagaacaaaccaatgcacagagataagaatatcttgccaggtgccaactaagcataagcatatatagtaaactgcgacgcgaaagtgaacgtttgtggcatgggcgtgatgtgcatcctggtcgcacccctcaaaaaatgtttatctatatcctggtgtagaatgctactccctccgtttcacaatgtaagtcattctagcattgcacatattcatatagatgctaatgaatctagacattataatatatatagattcattagcatgtatatgaatgtggacaatactagaaagtcttacattatgaaacggacgaagtagtttcataatatggcaagagaatctccttgttctcaacaccacaggaaaatggtagcttcaaattctctggacacagtgcttcacttcagagatcaccaattgttaggaagtagtatagttgaatattttcatgtttccattaactccaaattctcttagtttaacccccaaccatcactaccaggtctgataccagtcaggacagggttaatagaaaatattcctcttagttagtcgtacttcaagctgtaaattgacctatattgttactaaaataggactgagttgtaatacaaacttatgctataggcgtaaatgtaacactttcactcaaaagcttatatctagattaaagactgtaatgctgcatcaatcaaaattacatggctaaataataaattactaaatgcacaaactaattccaaaagaaacaaggacatggagaccagaaactacacttgtaaggtcatcaatagatatgacacaccaatgattatttaagaaccagattttatgccaccgaacagagtttttattgccatcaatagaacatcacatctatgagagtaacaagtacatgaatttatctcaaaattcaaactatgcatgaagtatcctatgagttctattatagggggagagagcaagagaacctgtaggtagtagagtgccacaagcgaactgtcccatcctcggagccagtaagtgttataggtaactccggatggaaacaaacagcagagacattatgtgcatgtccttcaagcgtttgaacacagctcttcgtttgatagtcccaaacctgattcaacgaagtgtctcgtaacaatgtccaatatactcacacgataattcactgcagatggcataccttcgcggtttgatcatcagagcctgtaattaagtatgggcgatcaccaccagtaaagtaatcaacacaattgacaccttttgaatggccatctaatgtgaaattaggatcaggggaaccaagactccatacctgaaattaaataagggcaccacattcaaatccagaccaagaaatgttagaaatgcaaaaactatgccaagcaaatgtaaggaacaaaatcacaaacctttactgtgcgatcaagggaagcactagcaaaagtattggtatctttcgggttaaatgtgacttgcataacatagtgagaatgcccctcgaagatttgagtgcacatccaacccttatcccaatcccaaagcttgatcagcatgtcatcagatgatgacagcacaaaaggctgggttgggtgaacagccacacacctgatgtaatccgtatgagcttcaaaaaccttgaccttatccatcgtattgtaattgtacacacgtatgaacatatcatcggcaccagcaactatccattgtttccgtgcgataaatttagatgaccgaactgaaatggggatgattatattagcaagatggtatatcaaggaacagaagtaagcgatgacgtgggaaagcatacctggtaactctgtgacttcaaatgatttcaccatcgtctggggatagatgaatatattataatcagtttaacagtaagagtaactatactgaaaatatgtatgtttctttttccttctatcgatttcactatactgaaaatactagattttacttttatgttttacctcctcctcctgttttattactctatacagtttgcaaacctttttagaagtcacaattatgtagctaacactcgaacatctgaaacaatcatctagaagttcattgactccttgttacttctgttttgaccatatcctttctacaatgcattgaagaattcctcgctaggttttaagaattcattcattcatcactatgcttacccccccccccttttttctccggaacaacttactatcactgcataccatcaaagttcactactacaagcacactaaatccaaatgtaacttgaattttacatatggatgggaatatccattttgcagtacaaaagctcatcgtgctggtagtagataatcatcatctcataaaattcatgaaactagacagaaaatgacgaattaagctactgtgaacagtcacgtacctgcgtctggtagttccagatgcagacgctccctgaatacagactcgacaaaatcctggcattacaccggaggaagttattcatgtgactttgaacaacacaatcattacatccctagcacccccaaaacccaaaaccatgtcacccacacaaacttgcccactcaccatggctcggtcggatgcagatccacggacttgaccctctccgacctctgcgcgagcttcctctgatccaaccatcaaacagacgatcactatcagctaaacaaaccaaactaagctaagcggatccgagggagacgcgcggtggttaccttgatatccaacctgagcggctgccaacattcacagccatcgccagttcgccgccagagaaaaaaaatcacaggagaacacgagcgagaatgcaatcacgtcagtacgcaacaaacaaaaaaccccagatccacgcggaattcgacgctccagccaccggatctcggcacggcgcggcgaggcgcggccgtcgaacggttcgcctcgccacaccgatcccccattcgcggcgaaacctaaacagcgcgagcctgggggaaggcgagagcgagagagagccgcgggggggttgggggggggcacgtaccattgtggcgcccgcgacggccggctacggcggggacgcggcggtagaggtgggctgtgaggccgtcgtgggtggaggggcgccggagtggagagaggcggcggcgcgaggcctcgttttctcggctctcgcggtgtcgcctgcggggagggggagtaggacgcggcgccgggaaggaggagggcgcgagatgggggagaagggtcggaggaggaggacggtggtgggcaaacgggttaacgggtcccggatgtaagatggcatgtggattggggatttgggggtctgttgacttcggccctgtggttccggaaaaattttggaatagaatattaaatatagataaaaaaaataacaacaagtttaatagtatagccaactagtagctacaattcatctataaccaatctaatagctcattcatacaataagtacatactacattattaatacctagtaccacttatcatacacacactgcatcttggagtccgtgctacagctggctacaaatctgtagcccgctgctcttctctcttcttatttatctccttaaaataagtttgcagctggcttatagcctgctattgtacctgctctaattatgcggtttgcataaaaatcatgagacgaatctttcaagtctaattagtctatgattagtcattatgggtgctctttttttaaaggaaatgtgtagggtcatagtataatcgtacaaatttcagggccatgtttgatttagattattaaataaattatcgttgcatgttatctacttaattagttagatggttaaatcaaatatttttttaaagaaaagactttaaatatcttagaactgctgatctaaaaaatgtagtagaagaaagttttttttttcaaaaagcatattttcaaagtatagagcaaataaacatgtgccgataatccagtaaataatctggaaaaaacaacgcaaagttacagatatgttgttaacagcgtgtcagtatttgagaacgaagggagaggcttcttttggtagtgatgaagatgaggattaaatacgggcatgtaaagcgaaagaagtcatgtaattaaattttaattattttaaactaaaatgtgggtttatctaatatattttaaaacaacttctacacaaaaaaaattttgtacaaaatacattggccttgtttgatcctccgggctattaaatcgccctctgaaatcttgctatttaggattattaaacgtagattaccgacaaaaccgattccataacccctaggctattttgcgagataaatctaatgatgtatattaatccataattagcggctgattactgtagcatcactgtagcaaatcatggattaatatatctcgttagattcgtctcgcaaaatagcctaggggttatgaaatggattttgtcagtaatttatgtttaatactcttaaatagcaagattccgaaagtgttaacggaaactaatgcaaactttgtatcttaatgggaaacaaacgtggcctaaagacaagggcggatctacagtgtagtgtaatgaccagtgtcaaacggcaccgatgactttttgcaaaatttataggaaaactgtttatccatatattataccaccatgatctaagcataattaacatactatgacaccaataaacacgttataacaccaacaaatcaattttctggattcatcattgcctaaagatcatcattgtatctatccgcgtaaaaatgtgagactcttctaatgaaggaacattattgtctaagtttatgcatcaagtgacttcatgtccattatccttcatggttttgaaaatgtgagacagataaatgtttccagccttcatggttgtgaacttgccgaaaggagatggcaaaggagaaaaaaaaaaagattttcgacggaataatcatatacacgacctgaggcatttggttacagcggactgataaaattttcaatggagcatacagcacggcgaatcaggtggcggattccattccatcatggcaatgtgcaaggcagggaggaggtccagtggccccgttcgtttctaatgaaaatggaggataaactttggattaaaatggcacgctttttaaacggctaaatggtgcgtttcgtgtgaaaactttatatatgaaagttgttctaaaatatcagattaatccattttttaagtttgtaataattaaaactcaattaatcacacattattaacacatcgttttatgtgaaacacttaatctttatctttatctttatcttaaggaaaaagtgcgaattaccgcctgatcgtctgaattaccccctgaaccacaaaaccggacattcttcacccctaactatacaaaccggatgaattacccccctcgacccaatccacggtggttttggtctacgtggcgtacacgtggcagtccagtcagcgtttttttaattaaaaaattatagaaaccgtatgtcatacacttcttactctctctccctattatgtctctcactcttttctctctcgcacggcgaggacgagcgcggggacgggcggtcggcaaggtgaggcgagcgcggcggcacagacgtcggcgcggaggtggaggaggcgcggacggcagaggagcgtggtggcggagctgtgtggcggccgaggagcggaggtggtggaggagcgtggcagcggagctgtgtggtagcggaggagcgtggcgccgaggatgttggcggcgcccttggcctcccggttgtgggcgagcaccttggagcccttggacgccgccgcgtagttgtactccccgccgcttggctcgagccggtgggccgccgcgccgtcggggacgcagccgttctcggccttgccctgcaggatccggttctggaactcgtcgagctaatcgagcgccgcctccgcggacgatttgccgccggttgtgttgttgaacggctccaggctccggtggtcggtttcctgctgtggctccggggggtgcaacgatggctggcatgtcggcgcggccgcagaggcgttatactcagttgggaaaatgtaggcctccagcggcattaccttgcagtagttttcacgcattccgtcctcgacgtcatcatagaaatctacaaagaagcgatcaatcaaacgccagggtgacatgacattgatcgatccatgagaggaggtggatcgttcgtgggtacctgaagggtcggtctggctgtggaggaactgggagcaaaggaggaggaggaggaggaggaggcaccagacggagaagacgacagagagggacacctcgcggaggccgccgtccatggacagcgcatcgatcaccggcgggtcgcagccgctgtttcctccgccacctccttctctcctcttcttgctcatgcatgcacctgcgcgcgccttcctccctgttgctgtgccaaagcgctaaccacgccgctgcacgctctcaccacaaaccttgcctctgcctccgccacaactgactccgcctccacctcctccgctgcctccgctcctccgccgcctccgcttctccgccgccacgctcctcctccaccttcgctcctccgccgccacacagctccgccgccatgctcctccgccgtccgcgccgcctctgcctccgcgccgacgtcaacgccaccgtgctcgcctcacctcgccgaccgcccatccccgcgctcgtcctcgctgtgcgagagaaaagagtgagagagagaatagggagagagtaagaagtgtatggcatgtgggtctcataattttttaatttaaaaaacgctgactggactgccacgtgtacgccacgtagaccaaaactaccgtggattgggtcgaggggggtaattcgtccggtttgcataattaggggtgaagaatgtccggtttaatggtttatggggtaattcagatgactgcgatagtttgggagggtaattagatgatcctccaccgtttgcaaatacttgttgccatcggttacctaataattattgtatcatgttttcgctttttactctggccctcttgtaagaacggtccgtgtttttctctctcctataaatgaaatggcagactttttgcccgttcaaaagaaagtttccatctctcatcgcccctctacggctctactatctatagaggactccaaagaatattcagcgtgttgacgaatgacgacgactcaagaaaagatacaagtataaccagccaatacgtaatttgattgttcaacctgtgaagatgtggcagagcattcagattatcaactgctcccgaaaatatcactacatttctacttctctagtacaaaataatatttaaatctgtatttggaggcgaaaggggtaaatcatcgatttaccagacattccaatgccaaactgttaccaatgaacaccaaaatatgcagaagagtacatccagttaattaacccacttggtatagtgtacatatccaaattatccatcgatctctctctctctctctctctctcacacacacacacacacaattaattaaccttctctaaaaagaagaattgaataagaaagaatcaggttctatagttatagacttttggcatcgatcgatcgaagtgcaggttggtaggggaaggggaacgacttcttcttctcctcctcctcctccctgagccgattgatcgagctagtggagcgcgtaggtggcgacgagcgcgacgaccatgagcgcgtaggcgatcccccggtcgacggcctgccggtcgatcacgatcatcccccgccgccccgcccccgccgccgccttctcctcccccgccgcgcccgccatggaagaggccatctaggctctagctagccacgatctcgagtcgccggagaaaaagaaaaaaggaacaatctgcgagcaaagcaagctactggagacggaggcaggaatgaactgggaattgctgatgatgccatggcgagctcgtgctgatgtatatataaggaccgatgagaaggaaaaagaagaagaggaggaggaagacttgcacaaggaaggtcgtcagccgccacgtttgattcggaggggtcagagaacctagaagaagaagaagaagaagaggccattagttaataagttaatttaattctgtgaggtcattttccttctagagaggcgaaagctactagtgtaaactgtagcttgcgtagcccgtgtccgtgcgtgcgacgcggacgcgaggtcggttgacgtgggaaaaacgtgagaaatgacgcggctgatgcgaggaagacgcgcggttagttgccggctttgaccactagccggcccgtccgggggtgacgccgcgttggccggccagccgggcccagctgtcatagatgggctggcagcccaacggacaccatgtatgggccgggctgtttggtggcccacgccgtggtgtacggattgtctttgggagcattttgctatcgatcactcgcgtgattttttttttgctaacatttcaccttttattcagctcatctgccgaccggcacatcggacacaagcacatcggccgttgtgtccagctagcccaagcgcgcacgatgatagagattggagaagcacggtgacaagtggcctctgaccggtgagccaaccgtcgacagcacggccaacactgatcggtgagcgacaccgtccctctcgtcgtcgtgaaatataaaattatagtcctatataactaaaattacatttataaatttagttgatttgatatgtaaatgcactataattttgataaaaataatgtgtaagtaaatatatacttattattttctataaaatataaaattacagtcatatataactaaaattatatttgtaaatttagttgatttgatatgtaagtgcactgtaattttgataaaaataatgtgtaagtaaatatgtacttaaaatataaaattacagtcctatataactaaaattacatttgtaaatttagttgatttaatatgtaagtgcactgtaattttgacaaaaataatgtgtaagtaaatatgtatttattatttttttaaaatataaaattacggtcctatataactaaatttacatgtgtatattcagttgatattacatgcaagtgcattgtaattttggtaaagatagtatgtaagttaatatgtatttgttattttcttttgtaatccgttggatgtaaataaagggtaaaataaatctaaaaaatcacccgactttttattaaaaatcacctgataaatggatagatgctcccgtctttaggctgctgcagcagcagaggccagggatccaactgaacacttgaacagaaaccggggccttttgttcctcctgttcttcctaagccactgctgatgttcttcatgatctctgattttgttttatactgttccttgtaattactcaccctatactaaataaacaaacctagtatgacatgtgacatattctgttactatggatatagacaggtcatctcacatacttgatttatttattttagagcatggagtaattcataatcttggtttctctctcttcccagtctcctatctctctggatcacttcttttagtatttatttaggggtgttcttaagtaaattacctacttcatggaacctttgtttttcaggtttgtatcatggacttcatgggagctgtttcgtgtaacacgaaaaaaaaaacaggtagggtaacgtacggctggtttagcatgttaggggtagtaaacggaaaactctcatttcctcaagattttgataataattgtaaaccggtctcacgatttaaacatggtggtagactggtagtagactcatactataagagaaccaatcaagtctatgatagtactgtttatcgtgacaagaattttttgggttgaaggatgattcacgtgttcctgaaccctgaggtaaacaaaaaattttcaacttctgaggtaattaaggcaaggacgtcaaagcatcttacaatcactggtggttattcttccaaatccgggactaattatatattcaccacaatgcaaaaaacttttgggaactatggataagtagtactggcgagcatttgacaactccagatatgaccgtacgaaaattcagctgaatgaacaactacacccaataatatgaggctgtttgtcagcagtcaaaagcacatacgactttcgtccatccaaaatactaatatcacagattttcttgatgttgtggtggagactaatataagattaatcgaggcagaaatggcattagtctacctgtctacgctatgcctttcactgttgaacacgttgcttgaattgagaggttgcactggaaaaataaaaacggctcttgatcatagccatgggttatctgaaagtgtatatgatcaggcctgaacagaacttgcaatggatgatcttttttttttcttctggatatttgaattgagagatattattcttgctatcttcgactatctgctgctcagagcaaacagtcaaacagatgaagtagatttgatcaaagaatgaggcaaaaaagaaaacaaaacataattcaagcagaaaagtaatattaaaagtatcatcagtgtccatactgttcatcttcatcttcatttcgatcgatggattaggacagcataattcattccacaaatttaatttacatatcgagagcaaagcaaaacgaggttcgaattacccgccatcgacagttttaaaccatcgacatcgattaataattaattagcgcgcgaaacgccaaagcgcgctagcccggcggatcgccggccgccgccggcggcggcgtagcgggcggagaaggagcgcgagaggtactccggctcgggctccccgccggccgcggcggcgccctcgtcgaagttctgctcgtactcgtcctgcgcgtactgctccctcctcctcgccgtcgacgacccgctccggctcatcaccttccacctcctccccctcacgatcctcctccacagcgcacgcaggacacccacgccgccgccggaatcgaagtactccccctcctcctccgcctcgccgcggcggtggtgcaccgccgccgccgccgccgccttattccctcccaagcgaaggactcttcttggcgcgtggtgaccgccgatgccgacgcagggggcgaaggtggcgacgacggcggccgggacggagcgctgcctccgcagccgccacgggggcggcgcgtcgacggcggcggcgacgacgacggtggtggtggtggccgcgccgcccgtctccgagcgaaccgtcatactagtattcagcaacgcacggcacgaggaagtaacgtaacgtacgtacacacgggcggcggcgcgcggcgaggcgacacgggaagggagacgaggagccggccgggctaactcgatctcgcgttggtggcggcggcttgcgattatatggaggaggagacggggatggatggttggtgtttgacgtacgtacggcgccggtggggtttagtcgttcgcgctgctgctgctgcggtggctggcgtggcgtggcgtggcgcgcgacgggtcaagcgcggggtgcggccgtgcgggaggtcagagactcagaggcgggggcgtatgatttttacatgggtgactcaatttatactatatttttaaatattttattaaatataattagagaaaaatataaataggtcgtagtatatagaagtataaattgattaaataagttattttcttttcttttcacatacttcctctgtcctaaaatatactacctccgttttttaatagatgacgccgttgactttttctcacatgtttgaccattcatcttattcaaaaaaattatgtaattataatttattttgttatgagttgttttattactcatagtactttaagtgtgatttatatcttatacatttgcataaaatttttgaataaggcgaatggtcaaacatgtgagaaaaagttaacggcgtaatctattaaaaaacggagggagtactacctaagatattaaggatggatgggatacttcccaagactatgattctgaataaactctttacccgattcttagtcctagaaagtgttcaatccgtataaaatctcttatattatgtatcctataaggctatgagcctatgatcaccttttagggcctatttagtttgactagatgtcggaaggggttttcggacacgaataaaaaaattaatttcataactcgcttagaaaccacgagacgaatcttttgagcctaattaatccgtcattagcacatgtcggttactgtagcacttatgcctaatcatggactaattaggctcaaaagattcgtctcgcgatttccccctaactgtgcaattagtttttatttttatctatatttaatgctccgtgtctaaagatttgatatgatgtttttgggaaaaagttgtaaactaagggcccctttgaatcgcagggtagaaaaaacggaggaataggaaaaatataggattctgacaggaattgaagtgtaaaacagatgattgcaaaacataggaaaaatacaggaatggtcgtttgattggagcgcaaaaaaaacgcagaaatcggatgagagagatagacttaaaggaaattttccatgaggttggagctcatgctaaatttcctccaaaattcacatgcaatatgctattccataggaattttataggatttgaaaaacttcaatcctttgaatcaaagggccaaatagaaaattttcctataggacttaaattctatgaaatttctatataaatcctttgatttaaagtacccgaaacgggtccttatatcggcgtggcggtgggtttggtcgtggagatggtgcgagagggagagagagagagagagggagagagagagagagagagaggtgggagtgtgtttcagtgtttgctggcggcgcggcgttgggcgtcatgtcccgtcagccagtcaagcagtgggcacttgtttggctgcgtgttcagattctgtgggtcgcacgcctcttttgttcttctagaagaaacgtcaggcctaatgggagtgcctagcaatcattcgaatgattttttcattcatctcactcggatttttccacatatggatgtgcgtcacgttgcagagggaaacgggctagcttaatcgtaacaacggactcaatctaacagttataagtccaaggaggtttaataaaaaaataaaaatgtcatcaacatatgcattaaaaagttacactgtaattttagtataattacattgtaatttcagtagttatagtgtaattatgtagtaattacactgtaattaatttgtaagtagtatataagtttgttctttggactcaaaaacaatattggttcctgctcagttggtaaaagtcctttgttcggcaacaggagatcgtgcggtcgactcctcgcttaaacgtttaacacgcacattttattttcccacccgtgtaagcacgaatcttgacgcaatcaaacggtccaaaaatcgaatgatatgtaacaagaaatctgtcgcaagatttatttatagcaaaaccgtttcaggagtccaatcatggaactgagggtggttctcgtcgagtgttaattaaggaaataaaaaggggaatgatagaaaatgaaactgaaactcaaacaaatttcggcttaatctgtataatttttttctcgaacacgtaaaagaattacacgtcaatatattaaaagaaaagaatattgttacacaacacaatcagttataccgagttatgtcaagaaaggaggaaaacaaaagacaaggaaaaaaactaggttactatgacttcaaatagcgggaagggggcagagctcaaatttttttctccatctctataattacagctatataaaataatttctaatatattatgtcgaaagactatcctactttggaaccgttcggtaagtttcctaaacatgaaaccttggtattaagtgttaaccctcacatacgaagttttgagctatttttgaatattcttaaagtgttttatttaaaattttactaaaaaaaatataagtcatgtttaaactgtctttagtgataaattaagtcacaataaaaaatatgaatcttgtaatttttttaggatgaaagttaagcaaattcggatagtgatgataccatatcatataccatatttttttaagagcattaattcatagcgaatgtggatgttgcggatgtgaatgcataacagattgtttttttatgtcagtaatgttgcagagtcaaagcagactccactcagaaacgaatcaaaattgctggtattgcgtatatatacaatcgatgcaacattaagttagcgatacaatggacaaaaaacaataatcaatcaacggaccaacataacaactattatctctctcctaaatatgaataagtctatataacccccgacctattaccaggtgattacttaaccccctcacctaacaaaccaggtatttaactccctaacctttactaaaaccgtttaattaacaccttgcggtggttttgcactcttgttttgctcgtgctactgaattcttgcacatgtatgcaattccgacttcaatggcaatgttatgaaccataaaaatggtatagattttcaatgtaaatagaggaccgggtagagtagaaggccttgcctgagaaaatcaggtgacagtcacagcatgcctgtcaatccatctgtctaacgtggcatgccagcaaggcaaaactagggagcaaaaccaccataaggggttaattaaatgattttagtaagattgggggttaaatacctggcttgtaaggtgagggggttaagtaatctcctgacaataggttgggggttatgtagacttattccgtcctaaatatgacaactttttggttatgtatatggatatacgtttgtccagacacagccaaaaatttgatattttgggatagaggtagtattttcttaagtacttaatatgaatccataatgtttatacataatagattagtaagatttgaaagtcaaagctggcattaacacgttcaagacaagcacccaatcaatcaacacaggatagcacacacatcctaggacacatagcacgtctaaatatgatgtccatatatactaataagttacaaatataaaacaacaatacatagcaaaggctatagtagcggtggttacaagtggtcatgagatgagatggtgagaatatcagattgaggagcctgagttaactcatgaattaggccattgaatgagtcaactcatgttatatggaacaaataaaatggttacatgggttgacgatttcagattacccgataaataacctaccggatattcagatgaaaatattgtataatccgcatctgctagattttaggataccacatccacaccatactatatgaatctatatccatatttattgaatttctataaacctcttccatatcctcatttcacttatactttttttgttaagactaatcgtcgaacttaatgtcgaaaagctcacatcgctatattttaaaaaatgggataataaaaccaaataattaggacgtcgcagggtccaatcagatgtcaagaaccgggaaatttcaacaaagtttaatcgaatttatgggtctaaatttgaatttaccaaaaacattcgaattctcctcaagatcaaccatagaaccatttcacgatttttgatcgtttgtgtttgtgtgttgtggtggcaggaaacctcaagagatggcgaagacatgcagcctatcgtcatttgctctgtccttccattgtatgacacgaataaaacttttgcgcaactaatcgcccgttaagtaagtcgatcgatcatcctctgtcattccagttgtatgacacgaaatcaagaacttgtcatcaccgcataaactttcagtactaatgcttactcatgtcttgccgtgtctcattgacagatcaaaatgaatttgtacaacttaaagaacattacaattaaacgtgtacaaaagaaacaaaaaaaaaagcagcaggcagcattgcatcatcgggccactgaatcactcatccgacaaggtaggtgacgacgagagccacgatcatcagaatgtacgcgatgccctggtcgatcgttttacctgaaaaaaacaacaacaacaacaaaaaagaaaaaacagagcacattcaggttcaccaagttcagaaaaacaatggagaagaagaaatcgagcagctagctggctatagctagctctcttgttaccgtcgctggtctgggcctcgaggagagacgccgccggcgagccctggcagagcagcgggtggaggaggacggcgaggaggacgtaggtgaggatcacggcctgcaccttgatggaacccatggccatggctggctggctagctagctcaatctgtccaagaacggacggtgaagagaagatatatatatttgctgctcaatttcttcttgttctatgtaactttgcaagaatgaactgaactgaaccgagctgagctataagctgttgctgataccagtgtaagaaatctcgtcagaatttatagttaaacggatgcaagaacagtaggggggtgatttctgatttgggttgtttattgctgcctgttttgatcagttcaaacggtcctgcttctacatgttttgaaggtctgatattggaggctgtattctatcataaaacataggatatgatagtgttatggagtggtactaagttgaggcgttcctcggcgagtcttttttgtcttgacttttgattggcagtggatagtcacagggacataaatgagcacaaaaagggttgagagggtgaacatctcaacatcttcagaaaacgattaagccagtgagagaaaaaaaaagatagtcacagcgggacagaggtgaataggtgatcatcttcagaaatgagcacagaaatatggctgactaggtgaacatcttcagaaaacgattaagccagtgataaaaatgaagggaggaacaaaatgcaccagccgggaatcgaacccgggtctgtaccgtggcagggtactattctaccactagaccactggtgccttattgttgcaaataaatggaaataatgtattatatgtattttcatatttcctttaaatacacagaccattcgtactcgagcacggggtccaggacataaggcccataaacttggttgcagtcttgcagaatagcccggtgtgcccgcaggctgaaatttgtgacattctgccacgaaatgcttaatcactcaacatcactagtcttcctcacgattcataaaatggtatgatctctgcatgtaatctatgcaggcgacgtgcgcggttgtaatgttttacaaaagtctgaacgctgttcagtttaatgatgcaattcctgcagaaaattgcaggcgacagctcaccagcaatctccagcatgacctgaacttgagcaaggcgatgcgatcgtgcaaacagttcgtcaatcaattccacacccctcccatcaccacacaaagatattaacaaactcccaagcatttataacgcactaattgaacaatacacgaagaacgtggagagaaaggggaatgatcactaaactcttcgtggagagaaaggggaatgatcactaaactctcgtatggatgtcacttcgttttttccatataatttaaatagatatataaaaaaccgtgaagataaaattaatatgtgatatatcacctcacaaaaatagaaattatgtttttaacttgtacaagttgtaaaaaaaaacaaattaaacatggctagtatgcatgtattcacagtcattatgtttttttttgaacgagttctattgacagagtaggaaaaaattacaagattacaatcctggagggtcataaccaggaaaaagaaaaaatataccaccacccacacaccagcagcgccaacacacatgacaggagaaggttagcaccggaccggccgtcgctaagcgtgaccggccgccgctagaccaacaaaggaacacagacgagatcgccctacagcaagggggtgccaaaacgacgtcttcaagaagcgacgccaccgtccgttagagctcaaaggagccaagactggactttcgcccggcaactgcccttgaggggtgagacagcacgacaacgccctcaggagggggaaataaccatcgttgtcggtctggccaaggccgggctaggttttcacccgtcgctcgccacctgcgaatccacggatgatgtaccgatgctccaccaccactcaaactctgccgacatgtggggcccctgcaccgacgccccccgccggccaaccttcgtgcgccgaagaccgcgccacacccaccggcagctccaccacgcaccgaggtcgcctcttccaccgccggccgcgcctctcgcgccaagccggcctcctctaccggacgcgcctctcgcgccaatccggcctccctccatcggccacgcctctcacgccaagccggactccatctccgccgctcgcgcctctcgcgccgagccggcctctgctgccatcggctgcaccactctgcgtcaagctggtctccgacccctcctccaaacgatgctgcgccggtccgatgtagccgtctgccatgtcctcggcaagccgtccgaggccgccatgcctcctcccaccaccgtcacggtcaccaccacctcaccgtcgccgccgtcacctcacacctgactccttccccgcctccactgccaacgtcgccgccgcctcctcagtcacggccgccgcaagccggccgccgtcgccgctgctgctgtcaccagccaccgacgtcagcagccgccgtcgcaaaaccgccgccacctccaacgcagccgccccgatgccgtcgccatgcggggagggggggggggggggcagatcggcctgcagcacgcctggatccggccgccgtcgctagcctcgccgccagatccacccgccgtcatcagcctcgccgccacctccatccccgccgctggcgccccctcaccattcccaacgccgtcacccccgccaccagccgccaccaactgccgtcgccagcccgccatcttcaatccccgccgccaccaccaccaactgccgccgccacctcaggccgaccctccgccggcggcctccccgccagatccggccgcggcagcccggatctgggtagccttcgctgtctcgcgcgggcccccaccgccgacgggagaggcagacgaaggcgacgaagccccgccgccgccgttcttgtggccgcgcggctttgccagcggcggcgaggcggcagagagaggaaggggggagcggcgatgccggcggtttccgcctcccatgtcgcccgtgagggaggacgatgcgggggcaagcagacaatgtatgatatcttactagaaatacagtcattatgtttttaacttgtagaaattaaatttaaatgtgtatgtttgtggataatatatcacatactaatctatttcatcaaatcttttacaactatttgatgtaatgagaggacatcactcgagagggattagaatagtttcctgaaagaaagggagtctatctaatggtcaagaggtggaggttgacgatgatgggaaggacgatgatgacgacgagcacaacaccggcgaggatggcgatgcatgcccacttgcggctgctccgctggtactcccgcgccgtctcgagctcgacggcgccgcggcggacgaaggagttggcgcgcgcgacgtggctctcgatgtcgttgagctggtggccctgggcctcgacgagcgccgccatgtcgaggaacacctggtggaggtcgagcaggccgcgctcgatctccttcacggcgtcgtgccgctcctggatctcggagatggtgtcgagcacctggccgcgcccttgttcctggatcgccttctgcaggaacgtctcgctctcccccgacgagatgagggcttccaccgtgctctcctcggctttctcccccgtcaccgtgtagtatcgccgcgccaccgtctccttgtactcctccgccatccgactcctcagcccctgcacgtattgcattgtttttcatcgttttcttattggtttatcagttatcacggtcaggtttaatgtttcggatattaatttcaataattttagagattattgtcctatagtccgcgataggacattatgatctctgaaatatttatttttttaatcaagcatttttgaagttcaacataaatttgttaaagctttaacttgtttgattccgaaatttcctcaatttctaaaatcttttcgatcgtcccccttgtgaaaagaaatgtgcaaaccaatatggtggaaacctgatcgcaacagccactattaaaactgatcgaaaccaatattaaaactgaaatttgaagttgattttagttttttacattgtagtctattttccagcattaacttttaaaccactaacaatacactcaaagatataaaagttttagccataatttttagctgctgttttttttcctcacctggaagtcgtccatgaggtccttgagcttggtgccgaggccggagacgatggaggagcgggtgcggtcggtggaggagccagggccgcggccggggagcttgcggctggcggcgttggcgcggtcgagcgcctggagcctccccttcacggccctggcgcggcggagcacctgctcgacgtcggcgtccatgcgggcgcggagcgacctcacggcgcgggcgtcgtgcgccgtcttgctcccctcgtgcgacgcctgcagccgcccgtgcagcgcctccagcccccgcatctcccccttcacgccctccacctcctcgaagaactgctccaggttcgcgccctcgccgccgccgccgccgccgccgccggactccatgtcgtcgagcgccgcctggttcttcaggtcggcgtacttcttgaacgaccccgacgagaagaggtcgttcatcttggataaccaatccttgatcgagcaggatgatgccgagcaggatcgattacgaactagacaatggtctgatcgatcagctgggttggccggcgatggtgagagagcgagcttggagcaattttaatggcgggtgatgatctgaaagtggctagctagctttgatcgcagatcataatttcttttttgttgagattgtgatcgatcaatgcagcgactaagatagattacggggatttgacagatgttgggaagaatggcttaggaagaagattgagagggaggaagggtgccaattggcaaggcgagaagaagaagaggcatattagaaaagctggcatccaacgaacggaatatggacgtgcagtggttgaaggggttcgtgcttctcgatctctgtctccatttgtgtgttggggttgactagtgtacatagatatgcagaatatatgtgtgtgttgtggccagcacgcacggccctctcccccgcgctatttttgggctttgccatatgcttttacatggatgcatcatgggagacaatcagtggtttaaagacattatttttttgtcaatggtttaaaaggcactaatcttttctgaacatcctctgaatgattaagaagtttacgatcattggagaggaaaacaatataaggtgctaaggtacacattttttttcatatatcttttttctgactacatcaaagacagtaacacacacggctatgtacgcgcaccattctcgtataccaacgcgtgcgccctttaacgcatacttaaaaagacgaaggtcaacggcaatttcatgttctcactcaaatcctattagaaatgtatatgtgcatgtgggagtacaaaactcctctagcgagaaggcaagataccctctcttgagagttcgggtagggtgcgagttcagagcccatgagtatagcgtgcgaaacaaaagaacaaaataggggatttatataggttcaggctgttgataagcgtaatacaataatcctatgttcttactatatgggaagatgatcgagttgttcaatggatgatgtggtgaaatggaaggtggtgaacacttcttcaacgagtttttaaggctagatctaacctagtctacttctagagcttggaataaatttttcggaacccttctctctacggaatggatcatccttttatacgtgaaggggagtctacaatactaatgtatgcatgcaggagcatgatccactccacgaaatatatatggtaccaatgactagggtcatcggtgccggttacacaactggaacctataacaatacataggtgccgcttgtctcaaaatattagtcccgtgagattgcgctcggacaaaaaaaaacactatatgtatctgtcgtggttatggataccacatacctaatagtagttgactaaactcggcagggcccaccatataccatgtcttatacggaaacaaacctcgtgtataggagttccagataaggaatgatgagtagagttctatatggaaaagataaggactaatcggattgtatccatattggtctccctagttttacttggacaagggggcacctatgggtataaatacaagcccccctaggaggagaggggacaagccacaagatcaacaagacacaacatatacacaagccaacacacgccgccagatctcgatattagagattagcctagatataccccatccggtgcctgtgaaggttggcaagaggaatctagcgccatttctgatctcgacgggtttatatttgaggaggaagactactctgtcattgactatgagctgattatccatgccgccaagtcgacgacagtcagataggttatcccaaatattgtacttgtgtggtccagattaataaagagcatatcggcttcggccaacatgatgtagggctattacctgtcagataaggggcccgaacctgtataaaaattcatgtctccatctcttttacctcaatctcgcatataccatggtaccgactatctccatactgtccaaataccgtagtcgtgatatcaaacgtcgataggtatcggttgtggacttggcgactcatatagtgttgtttttcccctatttttcagtagtgatatatgtgaagtaaaagaagagaaaacaagcttaggtgctacaattgagaaaggagtgagcaagggtgcagggtggggacattattttgatatctcaaaggatgtcccatcgtttgtttaaaacccatctagacagttacaaaaattcttgaaaaactggataacagtcatacaacatatataaatataccactttcacaaaatcttaggtccaaactacatgtgaagatatatatatacatatatataaagacaaattcaatgtatgattgaatattagcgtattgttcacatctgaatttatcttttttttttcttctcaatgtatagatcgaatttaaaattgacttcttttgtaccgatagatgtcactatattttacattatcataatttttcaggactatttgtagtggattttttaaaaaaatgcatgagtgaacatccttaaagattagaatccattaattcctcgtaagatacacacacatacaaactgaagaaaaagatttttgcaacacccattatgacacgtatagatctgcttcgtggtatggaaatactccatgctcctgcagggctgcaggtacgttttccattttattgttaagtaaaaccgatcgaagtaactatagccggctccctcttgtcaggttcttgggtctgctccaatattggcgtccacgtactccaggtcctatgaagcaacaaaagttaaacaaatttagttccatgtacagtacatgctgcagctcctaaaaattcaagataatgtggtcatctgtataatctgacagtcaagatatataattaagatcagtaaggagcttattacttggcatgtgtggcaacggggaggggggaggagtaggatgagttccgtcaaatcttggtgcacgtcgtctttcgccgtcaggacaacctacgtccacgatacagggtgagcactgagcagaggtgcatccattgattatttttaaataaaaaattaaaacaaagaccatgtacggattaatatatatcaagtttttcgaagattttccttggcggttgtagcagccaagaaaaatttatttccttgagaatcccctagcttggtggtttattagaatacaaggtaacatgtattattgtcggtttgttatatttcttgaagttttcataagttggaagtgttgtttttttttgttgggggtgattatcaagaaaactttcaggctttcccttgtacatagttacaacattagaaaaacacaaactattaatttcttgcatgtctcaattagtagacatattcatcgataaatattgacaatgtttctataggtaaatgtgtataattttattaggaatttagtgaggtctacgaatacatagttgagatatctatatgttcattaaattatgcatgtatttgcatgtgtgtaaatgctatgcgtgttgtctgctggtggtgtaggtgcgtatttgtggggagaaatttgttcatctctcgacaggaaatcccttcgtttctttattatcttttaaaaatattaataagatagttttatattagatatatcgcttcacaaaacatataagtttaaatttgacttctataaattgaatattcataaaaaaatatacctgtaaaagtacacataatagtttcagtttgtgcttttcaaaaaaagtttcagtttgattttttttcacaattcaaaaaagaacttaatctacatgtttaatcatggagtaatctatcgaccttgtcattttattttcaatcttttggtaattatttaggtgaaatacaagaaattaaacaagtagatgttccttgagggatgaaaatctatcttgtactcgcgaatcttttatatatatagaagtataagaaaataaattatatcgatcgttactactcacaaggatcaggtcgagcaacagtgtcgttgccggcgctgctttcagtggtgggggaagcagcggtagcatgcagcggcagaagaagcagcaacagcaggagcgctacagcaggtcgtagcacgaagaagcgaggccaacgagcagcagcagcagccatggtcgatcgaccaggcctcgtgctagctcctctctcttctgagaaggtgagaactgaatcgatcgatctggtgatcggtgagagcttggccgtggcttgatcatgtccaaaactttggccgtatttaaaaccagcgatgaagtcagttcagtcgtcgtagcctcgtaggcagctagagcttccatcctaaaatataaaaccttttaaaattagacacgtttattaaaaaatagaaataataaaataataaaatatgattagttgaaaagacaaaaaaaactaaaaaattatgtgaggactgttatgattagttaaaaagagaatgcatgtacaaaatttactatattttataataaattttaaatactagaaaataatattttgatatgaagagattaggtagctggccagctagcttagaaactagagatagtatataggtctctctcatttctatgttataagacattttggtttctctagtacttatctagattcgctaacatacatatgaatttggataatatataaacacatatatgaatctatatatgaatttatttaaattcaaaataacttataatgtggaacatagagacaagcaaattaattaagctgtagattcggattacggcgaggttgcgctttggccggagagcttcagctggtacaccacttgccaggctagctagctcgccggcgagtgcactacttaaaaaacataaattggtgccggttagaaaacccttttaggtgccagttttctcaaccggcacaagagagacggtactgatttgaaaattaaataggtgccggtccgacaccttttaggttcgacgaataaaaaaaaaacggctcgatgcgtcggctcgattgagccgagcagttcctcctcacacatccgcatccatccacaccacaacaagaacaagaatgaacaaaacaaaaagaatatcatcatccatccacagatggattcatccacatatcactgtccattcatcccacaacacaaattttggcactcaaatttatgcaataaaaaaagaatcacactgtcatggttatggataccacatacctaatagtagttgattaaatctcggcaggacccaccacataccatgtcctatacggaaaccgacttcagatatggagggagttccggataaggaaagacaactagagttctacatggaaacgacaagaactactcggattgtatccatattggtttccctagttctacttggataaggggacacctatgggtataaatacaaggccccctaggaggacagggggacatccacaacgagacaatcaacaggatcaacacccaacacaatcgacatagaagccacaacatagaagtctacatacgccaagacacgccgccggatatcgatttcagggataggcatggctattcccctacggtatctccggataccgtcaggagatacgaaagcgctatctctgatctcgccggacacggattcgaggaggaaggctaccctgttgtcgactacgagtcagaccttcagaccgccatgtcgacaacagttagataggctacccacatattgtattggtgtgattatggtgaataagagcaataccggcttcggccaacaagatgtagggttattacctgacaactcaggggcccgaacctgtataaaaatccctgtctccatctttttttacctcagtctcgcgtatattctagcaccaacgatcccaatactgtccaaataccgtagtcgagacatcaaacgtcgacacacacctctttagatccaccatcatcgccgtcacatggttggtcatctttgagctgtcgcgccacctcccgtcgcgccgtctcccgtcggcgagcccgctgactgccgccacccttcccgccagatctggcggaggggagggctcctccctgcggtagatcaccgcctcccgctggcgagccctctgcctactgccacctaccaccgatgagcctgctgcccccgcccaccgctgacaccgccccgcctaccgccgaccccactgccgcttcccctcccgccggatctggcggaggggatcggagggcgcggtcgccgctgccgcctccatcggccagccgccagcagcgagagagatagagagatagatagatagatagatagatagatagatagagagagagaagggagggagacggagagaagagagcgagacgagagagacgcgagatcaaaccttatctcctcatcgccttgttgtggtggggcccgccggtcggctcatctgattgccggctcggctcgatttctgtgggtgtcaaaccaacacctatagaataggtgtcagttattatttagaaccggtacttataattgattaaaggtgctgtttttttttcgatttcaacccgcggaaataggaaaaggcctatatatagtgccgatacctatttgatgttttgtgtagtggtggtaatatcaaaaatgaatgaccggttgatgattactctattttaaaatataagatttctacctagtttatttattaaatattaaggttgagatagaacttccatcggtgtccgagagataactctactcgcacgctggttctcgctccagtatgcagcaatctctcacactgcaacttccatcggtgttcgagagataattccgctccctcactggttctcacaccagtacgcagcaatctctcacaccgcaacttccattggtgttcgagagataattctgctcgctcactggttctcgcaccagtacgcagcaatctctcgcaccgcaccttccatcggtgttcgagagataattctgctcgctcactggttctcgcactagtacgtagcaatctctcgcacctttacttcagatggtcaaggtacgactacagcagcgtagcggtcctcttaccacgactccaagtgatcgagggacacctactcaccggttctcaaccagttgatcgtagtgatctctcgtacatttgcttcaagtggtcgagttacggctactgcctggtcctcgaccagcgatgcagtgttcctccgactacttccactttcagtggtcgagttacggttactcctccgactacttccactttcagtggtcgagttacggctactgcctggtcctcgaccagcgatgtagcgtttctccgactacttccactttcagtggtcgagttacggctattgcctggtcctcgaccagcgatgtagcgtttctccgactacttccactttcagtggtcaagttgcggctactgcctgttcctcgaccagcgatgtaccgatttctcccactacctctacttcaataaagttggtagcaggtacacaatatcgccaagtgttttacccagagatcccttaccacgacgacacctagcgttgaaacctatcctgctgtccctttacgccgtcttgacaaggcctccgaggaacctaagggatcttcgactggggacgcccagagccgataaggccttgtcggatccttcagagacgaaagaccatgtaagatctggttgtgtaagagttttcgccgtgcgtattaaccaagccgtgtaatcggaaaattgacttttccaacttcacggctgggggctaggatcaatgcttattcaaccaaggcaggtcaagggtccaagagccttctcctccgagaacgattctccgacgacaaggctgggggctagagagagtgtacaactcaaacgactgaccaaagtcgtgaactgagaagacactcttacacaaaacattggtcggtaaatttaattcattttcaatttaccatacatattataacatgtcacgctttgagcattcgctcgggggctatttctatttgatattcttttctgagtattgatttcaggaaaatcctattcgacattgatgaagactccatgtctctatggttctacaccaagatcgactaaggcaagtacgaccaatgtcgacaaggctccgtcgcagactctacgccttctcgatcgctcgggaacggttgctggatctcgacaaggaatacggaatgaagagatggtgtacccgccgagataaaatttcttgacttcaatccaaattctcgactacagcaagacgggagacttagtcgtacgctctgtactttttcggttgacatcagagattgacttagacaaaccctttcggtgcctgcacggggctgacaaaggaagtctaacgttatctctaaactcaccgagaacagtcacatgagcttgataacagttactccaatgcctgtgcgcggttgagaataggaattcgttcatttgcatcgaagtcgggggctactgtcatggttatggataccacatacctaatagtagttgattacatctcggcaggacccaccacatgccatgtcctatacggaaatcgacttcagatatggagggagttccggataaggaaagacaactagagttctacatgaaaacgacaaggactactcggattgtatccatattggtttccctagttctactttgataaggggacacctatgggtataaatacaagcccccctaggaggacagggggacacccacaacgagacaatcgacaggatcaacacccaacacaatcgacatagaagccacaacatagaagtctacatacgccaagacacgccgccggatatcgacttcagggataggcatggctattcccctacggtgtctccggataccgtcaggagatacgaaagcgctatctctgatctcgctggacatggattcgaggaggaaggctaccctgttgtcgactacgagtcagaccttcagaccgccatgtcgacaacagttagataggctacccacatattgtactggtgtgattatggtgaataagagcaataccggcttcggccaacaagatgtagggttattacctgacaactcaggggcccgaacctgtataaaaatccctgtctccatcttttttatctcagtctcgcgtatatcctagcaccaacgatcctcgtactgtccaaataccgtagtcgagacatcaaacgtcgacacacacctctttagatccaccatcatcgccgtcgcatggttggtcatcttcgagctgtcgcgccacctcccgtcgcgccgtctcccgtcggcgagcccgccgaccgccgccacccttcccgccagatctggcggaggggagggctcctccctgcggtagatcaccgcctcccgctggcgagccctccgcctactgccacctacccccgatgagcctgctgcccccgcccaccgctgacaccgccccgcctaccgccgaccccactgtcgcttcccctcccgccggatctggcggaggggatggtcgccgctgccgcctccatcggccagccgccagcagcgagagagatagatagatagatagatagatagagagagagagaagggagggagacggagagaagagagcgagacgagagagacgcgagatcaaaccttatctcctcatcgccttgttgtggtggggcctgccggttggctcatctgattgccggtcggctcattgatttagaaccggtacttataattgattaaaggtgctgttttttttacgatttcaacccgcggaaataggaaaaggcctatatatagtgccgatacctatttgatgttttgtgtagtggtggtaatataaaaaataaatgaccggttggtggttactctattttaaaatataagatttctacctagtttatttattaaatattaaagttgagacagaatctcctttctagttaccatagtgatcaaattttgaaatttgaactgcttagattctaaaatgtatgtatttctatgtatcagaatcaatgtttcagaaattgtttatgttatttttaatcctagacatgcttatattttataactgaaggagtaccacgtaccatggatgcaggctatcacattggaaatgagacagtttggtgcttcttctagctatagcttgtactgtcgaatcctgcagcttcttatttagtcactggtttttgaatcgagctgtatgttttaccaatgaacgaacggcacactgtatactcatgtaatgtaattacgacgctaggtgtttcattccaagtcgatcttgcagaaaagaacatacagtacataaagagaagcaaagctgagactcgatcgacacagtcgtacgtcgatcctgtagttttccttatttgtctctttcttcctgataggttcttatcgcctcgatgccagtagcacgagcacgcggtgaatacaagctttcctctctcccccatgctcgccggccggcctcccattggccgcggctaatacaggctgcgctagctatcgacgacgacgacgtcgtcggcccctcgatcggaggcagcaactgtgtgcagtacgtactatacacagctgtttcggccgccatgcgcaaatgcgtctttagggacgaaaatggccagaaaaatactcccgtactcttgcttttgaactcagcaaatccctccttttcccgcaacaaagctctttagtaatccgggctaacttttgtctataaatcccacgtaagaagtaaaatgacaaggacggacaattcttagaatataaagagagacaagtttgttaaaaaccatattatcatatatagtttatgtctgggcattctggcgcatgctttacaataagtaagtgcggcgcccaatagagctaaccttacacagtacctatacaggttgagcccaaaaaaagcactcttgcctgcctactcctcgacttagccgccgtcatagagagctttctagtcgttgaaaagccctgacactcaaatcaaaaagcccagaaggaagccttctctactccaatcttctccacatcccgaaaagtcgaaaactaagcgtaatggttttgtgaaatcttctaatatgttaattggtaaaaggattggagttggtttaatatatttctcgaaataactcaatcctttttttgctaagacccgcataaaaatatgccgcaaaccattagtttatatttaattttctcgatccccttctgacgggaatacgagaaagttaccagccgaaacaacaaaagcgcatttcaaaggattcatttgaaacttatactgcgaatgctttcctcagattcaggagatgttgttcctcgagctgagggataataacaatatcatcaatgtacaccaccaattctcggcgtaccataccctgaaactatatttcttttaccgtattcactaccagagaattgatctttcgacgtgatacccaaaatcaaaaatatctcggttagattaaaatccggtactaaagtatctttaataccggttctaaaaatctaaatccctataaacatctttagtcacagttggtattaccaaccagtactaacaatgcatctttagtaccggttggtaacaccaacccagactaaagatcgctttagttcggatttgtgttaccaaccggtaataaagatgtctcgagggttagttcaaaaggaaagcatatctattcaagtcaattgtgtgtagtaggtgggatggttatacgcgtgaggactaaggtgagagttcttgagttcgattctcacaccccacatatgtttttcacttgctaactgggttgctacaaccggtagtaaagaggttgtaagccggatctaagaatcatttaaaggggttgtaaaccagatctaaaaatcgtttcccaagtagatctttttctcggaaacaattgaaacattagagctagaaacaaaaatgatatcggtactctaccgagacactataaaataaaaaaaatgaaattagttgaataaaccatcggaaataacatatcataagggtaagggcacgtaagttacacttacatgtttatattataaattataacattatatgcaactattagtgaagatccggagtaatttgaatacttcataataatattatagcatcggggtaaattaaagatgatggcgaattgctgcgctccgggcgaattcgggccgacgtgctcgattctccttgcgtccacatcgctccactccctcccgcgtgcgaacctcgggcagtagtgggcccggcttcttcgggctggtttggcttaggcctaaattagggatatcaatatttggcaatttcaatagtgtgtctatttggtttgaagccaaattttggcatgcctaagaaaataggccatttcaatagtgaacttaggctattttggcttcaatccaaacacaactttgccttaccaaaattagtcatgctaaaacttgccaaaatttagcattggtaaaatttggtaaggcctatttagaccacaaaccaaaccaacccttcgttttctcacgctcgtagcgcgccgtctcccgcgcagccactctcggagcgaacggtgctgcagctgctgcgggcttgggtatctctcattgggccgttagggtggggccctaccaagggacggcccaaccccagagttagggcttcctcattgtcctgcatttagacacaagaacaaagtattagttcattattcaatgatagtggttccagttgctgcaattgttgtagtaatttcactgatatgtttgctcactgtccgctgaaaagaagagaagaaatcaaatatcgacagacaataacatggatatgacgataatttcatacaaagatattgtcaaagcaacaaaagggttctcttctgaaaacttggttggttcaggatcctttggagatgtttacaagggcaccctggagtttgaggttgatctagtagctattaaggtcttcaatctcaataggcacggaggaccaacaagctttattgcagagtgtgaagccttgaaaaacatccgacatcgcaatcttattaaagtcatcaccttatgttccaccttggatccaaaaggtttagaatacaaagcaatcatcttgcaatatatgcctaatggacgcctagaaacatggctgcatcaaaaagtctatggtcataatcagaaacaagtcttaagtttgggtgatcggagttgtatagccctggatatgctttataattgtaatgaattacgtttggtattaaattgtccaaatccaactattctgtttttgccataacctgccattaaatttcctatctaagcttgtttgctgatgtttttaactatcattcctaattagattgagattccataaaattttgtatgcatgataaactttattggtctaaacgatattatacatattgtatggcatctgttgtttaaccagaccctaaaaacccaaacgaaagaaaaaaataaaatatataagaaacattgctgagcaaggttttccgatcaacggatgattcgatgaaaactaatccactcctactccccctgtgcaattgaccatacagatgccatgtcaaagagtagtagaataatacacccctatttgcatgatggaaccatgaacaaaacccaaagttcagatccccataatccacaaaaaagtatggcaatccgatgatgcgctccagctaattgcgtcataatcattctcctagctaaatcgttgaaactaacaccggcgattttccgattgcatgtgcaagtgcaggctcatggcattcttatgggcatttccacgaacacaccgcgcgcacgcgtggcgaacacccaccacaaccaaaccgccgacgccgacgccattgcaaacacgcgtacagagaaacaacgcacgaaacaaacctggtcgcaggctgtcggacgtagatgcggcatgggcttctccggcgcaagggcctccgtcgccgtcgccgtcgccgtcgccgcaccagcggagaagtggagccgcttgtggcgagcgctcgaacgagaagaaacgcgagggcgaggaggcgcgcgtgctggactggatcgggcctcggccaaaagtagctgggctctaaagcggaatggaaaaggcccacagtccacggacgccgcagagagcccagtcagccagagacccgacgaagtggtgcggactgcgggctaccctctcttcgttttattttggactctttgtccgtaagatccgagcgcaaaatgcaatccaaatcgattttctagcggatggggattctctccccgcatgttacggaacagttctatttagcatcattgctggcttgctgctccctattttgttctataccggtaataacttggggatgaggatattattgcccgatttttctttactttgtttttagtgcaccagtatcacttgaacacaaatttaaacaaagtattccgcttctatacagttactttcaagaagctccaccaaacatggtggtattacacaatttctgtatctgagggtgtgtttagattcaggggtgtaaaattttggcatgtcacaccgggtattatatagattgtcacatagggtgttcaggcgggtataattcaaattcaaatttgaaacgggtatgtaaacttttgacttataaactttaggtctataaactttaggtgtataaactttagatgtatagaaatactatatatagaaaatatttgaattcaaactcaaatttgaatcagatataattcaaattcaaatttgaaacgggtatataaacttttgacttataaactttagctctataaactttaggtgtataaactttagatgtatagaaatactatatatgaaaaatatttgaattcaaattcaaatttgaatcggatatataaacttttgacatataaatttttggtctctaaactttagatgtgtaaacttgaggtgtataaactttaggtgcataaatttactaaaataggaaagtaatacggtgccaaaaaaaagaaaccaggtggagggagggagggggatcgatcgctacccaatcgcccattagaagccccgtgtttaggcactaataaaaaactaattacaatttccgtccgtaaactgcgagacagatttattaagcctaattaatccatcattagcaaatatatactatagcaccacattgtcaaattatggagcaattgggcttaaaagattcgtcttgcaaagtagtcacaatttgtacaattagttatttttttagtctatatttaatacatcatgaatgtaaacattcgatgtgatagggtgtaaagttttggggtggtatctaaacagaccctgaatttcttataacattgtttgaaatctatttttcaaccttatagttaattcgttcatttgtatccttaaataattatctcaaatcattaatttattcatccactcagctattcagctcaaaaaaacacccatatatgttgttcgagtcatgcacaatgtttattttttagatagacgggagggtaaggccccctccctaccataggatttttcattaactaagggcccctttgattttgatttgtagaaaaaaaatgtaggaattttagaggattttaattctatggaaaaaaaaatcctatgagggcctttgaaacaaaggattgaatcctatccaatcctttaaaattcctatggaatgggtaatcctatgtacattttggaggaaagttagcaagaggtctaaacctcttggaacatttcctctgagtctatctctctcatctgattcctgcgtttttcctgtggtccaatcaaatggttatttctttgtttttcctatgttttgtaatcctctgttttacaattgtattcttgccagaatcctgtgtttttcatattcctctgttttttcatcctacgattcaaatggggcctaaaagcatgatcgagtacacatgcatgggtgctacatcatccagaaatgcgcacgccggccttatgcagttttccttattctcatccgcacatacataattcatatcgatcggtagttcatagttccatcacttatttaggtattgttttttttattacaactgactgaactagccggtgtgtgcagctagctaggctgttgtgcctatcttggtatcggagacactagaacaggatgtccgcacccaccacctgcaaaaagttacaagttacacgtacaaattaaagttatataaacttgacaggtattttcttttataacaaatttcaatagttttgaattaacatgagaattcttagctctctaataggagtaagacattaacgcgaggaaatttatagaatataataatagccaccaattagcattagtaagataagtacaggtcctatgaacaccaaataatgtcatatgcatatcattatgtcaaacttagttatcaattaacccatccattcgtgcgtgtaacatgttttatttagactacgtcgacttcaataacctttggcggcatatgtatcttgggattttgattttccttagaatgtttattctgtcaagatactcggatttcaatctgtttattatatcaatgatttggcatatacagtatgtaataataaaattactttccaaccatgcatggaagagtagcatgtactcatgctttcttcaatagcttctgtaacaaacttgggcaacaatatctaaatgtatatgtttgtatggtggtttgtttgttttatcctttggaaaaaaatatcgtagtgtatactgctaaagtttcatgtagaatttgaatgtaactcaacatcttaattaatgacctttgtataatacactgattaaagagattgatttctatttgtaggatatactaccagctaaatatatttgatagttaggattttttttaattttttcttaactagaaaaatgcccgtgcgttgcaacgggtgaaggctattttaatcgtattattgctagattgttttgtctaaaaagtatatgcgatttttattttgatagtattcatatttaatctaaaatccttaatggctatatcatgcatgttactttcttataacgtggcaagaattctaaagcaattaggactctgactctcatctcaagttggcatatgagttttttaaaagaatttcttatacgactctttgtgtatttttaaaagcgaataaacttaaaaactgatcaaatatagacgatgtagtatcgatgaaaatatcttcaatttatttttataatagtaaagaagataaagatagaaatggagattgcaaattttagttaaccatgcatgtgctcagttttacattgatttttattttaatatccttaattactactacgaacttcactcgttctaaatcgatcactgatgtggctgccaggccatgcatgagtttgagtatgattgggtttcccaccggtgccttgcatggtttccattattggtgtctcacagtttcaaaaagtcctcgtccgttcaacaaaatgtccgtgtccgattccatacaaaatatgatcaatgaatttaaaaaaacggtttaaacatgaatgacgtatcaaaattttagcaaaaacatcttcaatttttataatagtagagattaatataattttttaaaaaaatctatgttacacaattagggttaatatgggtgcgtatagctaggagtatatgatagggaaagatcgtcgtcatgtctacctggcttgtcttgttctgaagagaaatgaacaagttactaagggctcatttgaaatggagtaagaacatgggaaaaatgaagggttctaattcctatggattgagtcactgtacagcttcattcggatagtaggaatcgggtcacgggaaaagctctggaaaattttgctacattagcgatacaagggaaatactataggacaaaatctatccatgcacgctgacctcttttttctctttcttcacgtgggaacgagaggcaaaatcaggctatcaagcaactaatcaaggcacaaaggacaattttgatttcattaatgttattcacgtcactagcatgtactgtcatgatttgttacagggcacccatttttttattcttatgttttttcctttactccatccaatcaactatcccacattttttttttcaattatctgttttacaattatatttctacgtattttcaatcatgtattctgaatgaaccctacaaacatgacatctaaccgactataccacaattaattaaaatgctttatttttcacaaataaaatcgtttgaaatattagcaaaatatatatttaatttgcctttgatttactcagtagcagatatatcatatacacgcccgtgcaatataatactcctacagtacagcataccagagcaattaatcatgggcgaaaggcaatgccaatatattgatatcgtacactgcttaaatactcaccaccagaaccatatcctcctgaagaactggtgttagtagcggctgaggcagaaatagcatgcagctggagcagcagcagcaggaggaggaggaccgccacgactatggccgctcgtagctcggaggagcgaacacgacgagcagcttccatggctgcctgcagcctgcacaaactaagctgcttgtccgcctcgcgcgcagagaagaagaagatcgagaaactccgactatggtcgatcgacggcgatctaccgccggccggtcgatcggttacacttcttgcttaaatccgcttccggtgaaccttaaattgtctgcgtacgaacgtacgtgcttgcttgcctgattcttaattagtccaaaactaacctacccacatatttaaaggcaacgatgaagtcaaccggttgattatttgttttagaggaaatttcactttggacctgatttattgaccaaagttccgccctgaaccaaacctaactctaccttttcacttcgaatttgctatcagtctagcgacatatctttaagttagatatttgttgatttttagacagtatgatttgcgtggagatttatactaatacggcggataaaaaacacatgcttgtgcatagcgggggatggattcgaggatctcttgttgccctggtacatttgttgggtgatttctaaaaaaaatcagcgagattttttttactattagatttatatccaataaactataaaagaaaattaaaaatacatatttacttacgtaatatttctatcaaaattacagtgcactcacatatcatatcaactgaatttacaaatataattttagttatataggactgtaattttatagtgatatctagtagatatattgcatagtttattggggctgtctatatgggattcgcatgatttttaggcttccatcatgcagtgttttaccaagtagatcgaaaatgtttcaatcttttaaaaaaactaaaacacaatcaaatcaccccatgaaatattttgctacaacttataaaacaacgattctgaatatattgaaacatgaaacaaatccgagtacatcgagaaaaagtctatataggattcgcatgattttttaggctttcatcatacagattttgaagccaatcgaacgctgtttcatcaagtagattgaaaatatttcaatcttttaaaaaagctgaaacacaatcaaatcacctcatgaaacattttactacaacgtatcatacaacagttctaaatatattgaaacatgaatgatttagctatcaaaaaaacattcgacagccatttagccttcccgataatacagtgtatttacatttataacgtatattttagtttattaacaccataacttcaaccaatttagcttaactgctacttggtatacggctaacagggcaaccagtgatcctcgaaccgatcccccgctatgcacacgcatgtgttttttatcgaccgtattagcacaaatcttcacgcaaatcatacggtctataaatcgacaaatatctaactaaaattctgtcgacagattgatagcaaatttgtaaggtataattaacttgttttgaagtttggaccgggttttaagactttgtgccaccacgttggcttgagcctagtgaactcagttcaggaagagaaattagcgcacggggaggaggaaggtagtgtcgtggagacgtggaggtggtggcagacttgctcaacgccaaggtctccaccctcgccgccggtggctcccgcgcctacggagcggcacgatgcagcggcggcgtggcacgacgcggcagccgtgtgctcttctcactactaaaaaaatatttttgcaggcaggcaaaactaatttttccagacgggagggaggaccgcctgcagcacaatcgattttcgcagtcggggcaatggcccgcctgggaaaatgcaatgaacgaacaaaaaaaaatcgcgggacgcgcctcgccgccgccgccctccctggccagatctgggatgggaggggagaggagccgcgctaggagccgccgttgccccgcgccgtcatcgccgctaccccacgatgtcctcgccgccgccgccggcctcccctctccctcctccggccagatctggaagggaggggggaggggagccgctgccaccgtcccgcgcgtcgtcgtcgccgccaccccctccagcctctcccctccctcctccggccagatctgggagggaggggggaggggagccgccgccgccgccgccgccccgcgccgtcgtcgtcgctgccgcccccgctggcctccccctccctcctccggccagatctgtgagggagggagggaggggagacgctgccggccgccccgcgcgcgacgccgcgccccgccgctgtccgcgccgccgcagtggccgtccccaccgcaccgccacagtgttgagggagaggacatgagaggagactgagtgttgagggagagagagatagagagagttgagaggaaatgagtggtggggaggggtgggaggagaatatataagggtagacttaagattttttttggtaggtgcgatttttgcaggcggacaacataaggttcgcctgtgaaaatagattttcgcaggcaccgcttaagtggtccgcctgcgtggacagcgaacttcaccttgatttatatttttgtaggcggtcatttggctccaagggttatgtctgcctgcggaaaaaaagatcctcacataaaaaatgctttttctaatagtgtctctagctccggtgaggcatggcgcagcggccgcgtgctcttcttcggctctggcgtggcacggcagtggcatgctcttctccagctcgaccgcggtgccggcaacggggtgcatgcagtgctccttctcagctcgtggcaggatgggagaggattccaaaagtctcaccaagttggagtagcatttattatctctgtgtattgtaggtaagtaccactaaagagaaggcactggaaaaaaaatatcacaagtgttatgttgtcccgataattcgttgtacctcatcaggtacatgtacatatggaacttggaacccctttgctcgtgtttagtggcaaaacttacagctccatcttacttgcacaatgcacacatattcagaaacaaacaaaactgattcattcagccagtaccacaccggagctgaagagcgcgccgccatgccatgtcggagccggagaagagcacgccgccgctgtgccgttccgctcgggagacgcggccgggagccgccggtggcgagggtggagacagaggagttgagcaagtccgcctccacctgggtgaggatcctctaatataatgtcactaccattacaatcactataatgtggtcccaccctcctattaccccacacgtcaatgcctgtaatgatagtgccattaaggtagaggatgtgaaccccctccacctccacggcactatcttcctcctccctgtgcactagtctccctcaatacctcctcttccctgaactgagttcactaggctcaagcctggcacaaagtattaaaacccggtccaaactgtaaaacaaggtaatcgttcttggtgttaagtgaaaaggtagagttagacctcgttcattgagaaactttggccaataaattaggccctaggtgaaatttactctttgttttatttaaatattttgtataaacataaaataaatttaagtcatgcttaatgaacattcgatgataaattaaatcacgataaaatataataattacgtaatcgttttaataagacaaatgatcaaacatatattaaaaagttaacagcgtcgtaccgcatagatcgatgtgggcgtacggctaaagtagtacaattaattgaaacctgtggactcggacgggagatgttcagctccgtccggtgagttccagccgtcggtatacacatcgtcggccggcgggcgccacgaataatcccaaacaagtcacgtgcatggttctttaatgatctgcggatcatcctaaatcctatactaccacttatatatcgtcgatgcgacctatcgcattggaaattgaggcagtatagaaacggaagttttattaatagccaaatagccaatacattttcataacatgccaatttttatgaattttattttgaaaatgaaaacatgacatcaagtttgaagataaatagttatgaacttaataagtcatgtttggattgttaccctatcaaatattgatgaaaatagctatacatacgacacaactcacgtactactgaatttgatcaacggttgtaaacgactatagtgcataagaacatgttctcttttgattgatatatggttacatatctctagttgtacatgagttgtacaactgaatcgtacgtatagcagtactcaatatgagttatacaactgcatcgtacgtatagcagtactaaatactgatagtgtcaaagcttgggtaagttttggctctatcaaaattacggtaggacaagggttcctagcttatattggtttaattagcacatattggcttcaaccaaaacacacaaaagatactactgaagttgcccgtgttttgctagggcaagttttggaaccaaaccaaacaagctcttaattatttgaagacaaagaaggtgtcaaacatgaattgcgcggtatgttcgacggcctgaagataggagtggtaatggtccaacctaactcagcgcacatatatatattttttactctctttagtcacaaatatttaacacggttgactttggaaacatttgaccattcatctattcaaaatttattatgaatatgtaaaaatataagccatgttcaaagtaactataggtatcacacggatatgtggatccccaataccctcacaaccagattgggaggcagagcatcggtccatttctatgaagttatagaatttacaaattataatatgcaccagcttctcataatctctagctctcctagcgggccttaatttcgactgtaactgctctaaattttcatacatacagttaccttcagtaaacatagcgtgttaacttaactttgttcttttttctctaccgggaaggtagcagagaaacttccaatcctctaaattttctgtctctttcttccctaggttcttatcgtctcgatgtcagtggcgctgggacgcggcgaatacaaactttcctctctcccccatgctccctggcctccttcctactgacaccggtcaatacaagcggcttatcaacggcgtcggccgctcgatcggaagcagcgtcattgagcaaacagcagtttcggccgcacagcaaatgtactccccttgatgtcttgatagcccattggtatccattcttctgtcgagtagtactaatctttgagctgcccaagtgcccagcctgccatccgagactgaagagcgtaatttattcggaaaacatttgtagggaagatggggtacgtacctaactttgatcgaaacattcaaaaccaatccacaatgctggtttctgaatcccagcagatgataccgttgatctgaacaagttgccagccagtcaagtgagcaaggtgcttagccatataaaagaagcacgcatgcttcctgaagcttacatcacaagcacaagtagctgcagccacaccagtagtatgatcagcccaactagtcctgcactgtttctagtcctccttgccttgacatgttcatggccatcgtcatcatcagcaggtcatggcgacggcaatgacattgatcggcaggctctcctttccttcaggtctctggtctctgatccagccagagccctagagtcatggaggatcacctctctcgacttctgccactggcatggcgtgacctgcagtacgacgatgccaggccgcgtgaccgtgctagacctcagctcctgtcagctcgatggccttatacctccgtgcatagccaacttgagctccattgagaggcttgatctgtcgaacaatagctttcacgggcgtataccagctgagcttagccgcctggaacaactacgacacctcaacctgagtgtcaattcgctcgatggccgcatcccagccgagttatcttcctgtagccgtctcgaagtcctgagcttgtggaacaactccctccaaggtgagatccctgcaagcctagcccaactcgttcatatccagctcatagacctgtcaaacaacaagctgcaaggaagcattcctagtgggtttggcacacttcgtgagctgaaaattctgaaccttgccaccaatactttggtgggtaacataccgtggttgttgggcagtggctcatctctcacgtatgttgatctgggaggaaatggcctctctgaaggaatccccgagttcttggcgaatagctcatctctccaatttcttagcctgacacaaaataaacttacaggagcgctgccacgagctctcttcaacacgtcctctctgacagccatttacctcgacaggaacaaattaattggttccataccacctgttacagcagttgctgcacctattcaatacctcagtctagcagagaataacctcactagtgagatacctgcctcaatagggaacctttcctctcttgttggtgtttcccttgcagcaaataaccttgtgggaagcatccctgagagcctaagtagaatcccaactctcgagatgctaatactctcaatcaacaacttgtcgggtcaggtaccccagtctattttcaatatatcatctctgaaatatctagaattggccaacaactcactcataggacgactgccaccagatattggctacaagcttccaaaccttcagagattgatcctatcaaaaacacgtttgagtggaccaatcccagcttctcttgttaatgcttctaagctagaaataattcatcttgttgatattgggctcactggaatactgccatcctttggttccttgtcacacttgcaacaacttgatctcgcatataaccagcttgaggcgggtgactggagcttcctctcatcccttgcaaactgcactcagctgcaaagactctgcttggatgggaatggactgcaaggacacttgccaagctcagttggtaatcttccctcggagctcaagtggctctggctcaagcaaaacaaactttctgggacaattcccttggagattggaaaccttaggagcctcgaagtgctgtatatggatcaaaatttgttcactggtacaatccctccttccgtaggaaatctaagcaacttactggttctaagctttgcacaaaataatctctctggccatgttcctgattccattggcaaccttgtaaaactaaccgagttatatttggatggaaacaacttcagtgggactataccagcaagtttagggcaatggagacatttagagaagttgaatctttctcacaattcatttggtggaagcataccaagcgaggtatttaatatttcttcactgtcacaaagcttggacttgtcgcataattcctttgctgggcctataccactggagattggaggtctcataaatcttggcagccttagcatttccaacaaccgcctcactagcaacattccatccactctcggaaagtgtgtgcttctagagtcccttcacatggaagaaaatctccttgtaggaagcattccacattttctcatgaatttaagaagcatcaaggagttggatctctcttcaaacaacttatcagggagcattccagatttttttgcatccatgaattatttgaaggatcttaatctatcttttaatgattttgatggacctgttccatcaaccggcattttcagaaatgctagcagggtgtcccttcaaggaaatgacggtttatgtgccaacaccccagagttagggctgcctcattgtcctgcattagacagaagaacaaagcataagtccattattttaatgatagtggttccaattgctgccattgttcttgtaatttcactgatctgtttactcactgtctgcttgaaaagaagagaagaaaagccaatattgacagacattagcatggatacgaagataatttcatataaagacattgtccaagcaacgaaagggttctctactgaaaacttggttggttcaggatcctttggagatgtttacaagggcaccttggagcttgaggttgatctagtagctattaaagttttcaatctcaataggcatggaggaccttcaagctttattgcagagtgtgaagccttgaaaaacatccgacatcgcaatcttgtcaaagtcatcaccttatgttcaaccttggatcccaaaggagaagaattcaaagcaatcatctttcaatatatgcctaatggaagcctagaaacatggctgcatcagaaagtctatgatcataatcagaaacaagtcttaactttgggtgatcggattagcatagctctggatatagcatatgctttagattatcttcacaaccagtctgcatctccactaatacattgtgaccttaagccaagcaatgtgctgttagatctacagatgacggcatatgtcagtgattttggattggcaagattcatgtgcactacaactgcagcatgcgccaattcaactagtttggctgatttgaaaggatccatcggatatattgcaccaggtgagacgaaccattcactatctatttttcttctaatttatataaggttttcccacttgatttacttatccaatactatattcaagtgattttccttattattaaatgaatacttctgtttttaaatacatatgtagagtacggaatgggtggacctatctcaaccaagggcgatgcctacagctatggagtgctcttattagagatattaactgggaagcgtccaagtgatgacaaattgaaggatggcttaagccttcatgaactcgtggagtcagcatttccacacaaactagatgagattttggatcccattatgctgcagagtgacctaaatggaggaaaatatcatactgaaataatgcagagttgcatcataccaatggttaagctgggtctgttgtgttcgtccatatcaccaaaagaccgattaggaatgtcacaggtttctgccgaaatgggcacaataagacagtcatttcttgagttacaatgagaacaaggagctagctgcgatggtaaatagtactgacaattgcagaaatctttttgttgaaatgatcataatgggacgtgcaatcttgttctttatgaggaagaaataaaaacaaaaacagatagaggtgaatgcatgaaaaattctagctccaacttttgttccccacctaatagtaccaatagtttcagctgtaatttggatgtttgtacaactacttttaatacactttgagagttgtaacgaattccatttggtattaaaaaaataatattggtccaccaagccaattattctgtttttttccataacctgcaattaagattcctatctgagcttgtatgctgctgtttttaactatcgttcttaattagattgagattccataaaatggtatggtgtaatggcattcttgttcctgggataaactttattagtctgtacgatattattcatattgtatagcctatgttgtttaaccagatcctgaaaacatgacaaaaagagaagatataagaacctgttgagttgttgagcctatggttttccaaaattgccaactaatccaaccccctgtgcaattgaccatacagatgcaatgcgaaacagcaatataatccccagttccccacccctgtttgcccccaaagttcaggtcccccgtaatccacaaaggtacggcaatccagcgacgcgtttctgcagttctgctaattgcatcattatcgttttcctagttaaatcctagaaactaacatggtgatttgccgctggaatgtccaagtgcagccgtgcaggcgcgtgacaccctcatgggcatttccacgaacacaccacgcgcacgcgtggcgaacaccaacctccaccgccacacccccgccgccgccgccgccattgcaaacatgcgtacagagaaacagcgccacggaacaaacctggtaggaggccatcggacgtagatgcggcgcggggccttctccggcgcgcggggcaccgtcgccgtcgccgtcgccgccgcaccagcggagaagtggagccgcctgtgacgagcactcgaacgagagtcgaggagacgacgcgaaagcttattaggacgcgcacgtactgggccgaaagtatctgggcccaaacggaaagtggttagagcccatattttcacctggaaaggcccacaggccacagccgccgccgccgccgcagagaccccgaccttcggtgcggcggctcaacgaggcgatggacggcggcggcggaggccggcggcctcgtgccgtgttcatggccttcggcacccgcggcgacgtcttccccatagctgtacgcgctcttccctctcttcgtattttttttcgtctctttgtccgtggggattcgagcgcaagatgcaatcccacttgattttcttgcggatggggatgtcaccgaacagacagcgaacagtttacagctcgggatgaacccatttagagtctatacgcctaattttggatatattttttccctttttcttaggcacttgctgcagcttttgcgcaggaccaacgacagtatggtgtagtgttcatcacacattcagcacatcaggtttgattcttgtagaaactaaaactcaatataaacttgcctagctggcttagctttactgggatcacagtttcacatagtgaatttgatgcagagcttgtcgacacatctagcagactgtaatgttagatatatgcctgtgtcaagcccacctgtccttgctgccgaacagctcgagagcatctcatgtaagtgccgtgaagtctgtccaatttcatgttcgtgatttctctttttgcaaatatggtttatcatgtaagcatttttgataggtgattctgttcaatcaaatgttgagcatgactccttttcgcagaggaaaaagaccattcaagtggagcacaggagagagtgcttgtctgccgtcgaaaatgtttttggaaatgacatgagcactcatggtgatttcattgtgatcaacttctttgcgttggtgaggatcccattaacaaagcttgctataagttgagttgtggagctcctggttcaactttcagttagtccttatgtagcttaattcattcttcaaaatattggaggtaataatacagtcctgccacaccaattcatgttgaaaatatggaatttcattgtttgaggatgcacccgaacatttccagtacaatctcagtcagtcagtcagtcttatctaggaataatctatggtgtatctattaaatgccttctatggtcataatactccattaagttgcaagaatcggagataattctagaaccttgctctgcactatccatatttggcactagaacagctccaggactatacctgttagtctgtcctatatgtggttatatacgtaatttggatctttctcacaattcaggaaggttggcatcttgcagaattgttccaagttaagtgcatcattgctgctccctattttgttccatacaggtaacttggggctttactgatttcaactccagtttttatttattttatgaggattttccccatattttcaattgtcttcgttatgactttaattcatttacttgtagtgcacctgcatcatttgaacgccaatttaaacaaagtcttcctcttctatacaagtactttcaagaagctcccctgaacatggtacaaaatttgctcttctagtagcaatgtaatgctagtgtattttacctccttgaattcttttttttttcacttttggttggttcgttttcctatgttctagcattacaccttcaacttgctgctaaggcttatataatgataatattttacaattctagcatttaccaaaagttcacattgtgtgtgtgatatctagtaaccgttgttatggaatactaaacaatagagcagtatcctgcctattgcaattcctaaagtttaatcaggatcttcatttgatcctttgaagccgcaatcatcaggtttcctgtccttagcatcacattatcaaatgtattgctttgatatatgtggacaatatgccgccttatgttgccttctaatgcatcttctgcattgcaccgggaaaactgatgctgggaaacatgtcaggtttgctggacagacattacccactggatgtgggcattgttcatggaaagttggggatcatggagaaatgatagtctaaatcttagcccaattccttttacagtgagtgaaagcatttacagtatataatttttgtttttatctatgcaatccattctccattctatttatgtgcaattcccatagggtctgtactgaggtcagattttttttaataactgcaggatccagtaacaaatcttcctctgtggtatatgcgagaagaatccccattgttgctgtaagactcatttactctatcgatattaagcctgtatcttgatattaacatatatgaaattgtcaccctcatatgtcatagttttgaagaatttaaattgctaaattaagccaactaggacttgtgatagtagttatgagttgggcatggataaagcagttgtctgaaaatgaaatgttatagctgcttttgaatttttgattacttgattatactgaataaatgagctccttgttcatcatttgagcaggtatggtttcagcaaggaaattgttgagtgcccaggtaagcaatgctgaggtctttgtatctaccttaaatccttacagatgtttatacttaactagatgaataccccgccgtatttgctgcaggaaaatatatacaaataagctgtaatatattttctaagccaaaacaaaatgacttcctatgttctatataatttacacatggttgcaaatataatgcaaggtgaacatattttatgtaattgatacttatgaattttgagcctaaaaataattgagattgtatggttttatgagagaagaaagaagtgtttgtaccatagatctatcatccaaagagtagaaataattgggatgatgtagcttcatgagataagagagaaatagcattaactatacttagtgggaatgaactatataataatataggattcattcacatgaaaccaaagtttgatatttattgtgtaacatcatgacaggatattggccattcagcgctcatgtttgtggtttttggtttcttcctatggcttggcaattttcttgtaataaatgcaaggagttactgtgtggaaatgccagtaattctggtggtgctctctgtgtaaatcatgctggcctagaacactttaccatgggaaattcttattcgtccttacctatatttataggattaagttccattggtaggtgagtttcttattctaacgaatttatgtctgtttttctatttcacaacgacatttctcttagccagtgcagtgtccttgatatgtttatatattttacattttgtttgttagactttagagctgtatgatttctccataagtgttatctgatttgtaacttactaagatacgagaatcaaccttgatgaagttgacatctcgctcatgcccttagaagtatcgaccgctcacaaatgcgcattttgaatctgctgttgacaagctcactgttcttattttgtgcttattttcataactttaggagtcaaatttcttctatttcattagcaaaaatttgaattaggcctttcttggtatacttatcatgacatcaacctcctgcagcatgggttttcttagaaatccaaaagcatttctgatggtgcttaaagctgtcatagagaaaacagattacagatttatccttttctcatctggataccagccattagattctgcaatacaatattttgctccttcagtagcagaatcaagtgagtatcaggcatctgctcttcattgtgacagcaatctcctttttaatggtcgactcttttgcttttctgggtgagtaatatcacaaatctctttattcttgctggaaacctgtacatgcactggccaatgacatgactaccttttcagatcaataccatacagttggctgtttcctaaatgtgcagttgctattcaccatgctggcaggtaaaataaatttacattttctcactgtggcccagcatatgattgaaaattttttcccattactctacagaatttctaattatccaatacttccataacagtggatctacagctgcagcactttttgccggcatccctcaggtgataaatacagcagctttgcaccgatatattttgtattgtttgatcactcgggtggttcaatgttgttctttctactcttgtttttgacatcacttagaaacaacctatggagtggtccagggtgacaggcaaatattcaaataatgttctatattctatactcaacatattacatggctgttataaaattatgttattagatggtttcagattgctcacacaatcctgtcatgcagatttcatgtcctttcctgctggatcagttttactgggcagaaaggctacactggctaggagtggcacctgagcccctaggaagacaacatctaattccggatactgacaatgcctcaagcatcaacagtgctgcagatatgctgattggagctatcaaatcggcattatcacctgaaattaaagctcaggcaaccagaatcgctaacaaactttcttctgaggcgtgttcttcactaacagattacgaatgctaaccatgcttatttttctttgaaggaactctgtagctaactttttttcatgttgcttttcgcaggacgggattggagaagccctcaggatcttgaaagagagttttgccccaaattgaaagttaagtgataagaagcaggggatacgacgaaccaattgcacgtaaaatagttatgtgctttgaagtttgaattagcatttgtcactccaattgatttattatgcgccgtatgaactggaaaacagccttggtcactagtatttttcttgtttggaatggaatggaatggcaaaacggcaatatgatgaacttatgcagagacttgtgttgtagatagagtaatcatgaataaagaaaaccaaaaccatgatatatgatatatctagatcctcacactcatggaaatgaaaaatgcatgtcaaacatcacaattcttcttgtcgaacaagaactaggattggattgcttgagagataacagcaaaaatggcaacaccttgaggtattttctatttgttcactattgggcaataatcacgaagcagtccgagtgttgcttcggtgtggtatgaggatgaaaatcgcttgtggttgtaggcttgtagctcgatattcgttatcatgtcgttcttttttcattcttaatttttcaataaatataggttaagtgcatcctaggtagagaggctagaggtagtcttggagtatttatatcatcttctttaagatcaataaggtttccttttatctcatcacaagcagtgctgtatttaccaagcagtgagctcttgttatttcaacttttatgatgtgtaaactttaatatgggacccaccagcatatgatgggaacttagaagagaatattattacttttttattcttatggtctgctcatatacatatgaactgctatatgtggctcacttccacagtacttgagcaagaccatatagagatatggatcactttttcctcctatatggagtattgatgatgtgaaaacaacaaaacagttaacgctcactcccagtgaagcaaaacaatagccatcctgcacccttaacttacatctgccacaaaaaagctacagtactaagggtgtgtttaaagtttttgaaggatccggacacacattaaaaatattaatcgtagactaataacaaaataaattacaaatttcgtctgtaaactacgagacaaatttattaagtctaattaatccgtcattaacaaatgtttaatgtagcatcatatttttaaatcatggcgtaattaggctcaaaagattcgtctcgcaatttacatgcaaactgtgcaattagtttttttccccatatttaatgccctatacatgtgtccaaacatttgatgttatatttttttgccaaaaatttttgaatctaaacaagacctacatcaatttctagtaggagcaggcttgcagcttacagatatgtacagtgtcacctcaccttggcaatccacaagacttgaaaagtgaaatggttcaggttgagttaggcaagtttgagctagcaaactacccttaccaactccatgcactgctgctccttgcaagcaagtaaaacaactccacaaaaagcgcgggaacatttttttttaaaaaaaaaaactctagctagtcctcacctagtataaaaatctagcgagctccaaatcacaggaagacacaccaccaacgacgcgagcctgaacgatctctcgcacacgagaaaattgcaattagctagctagcaatggcgcgccaccacctcgtcctgcacgctgcgacgccggcggtggccgcggcggcggcgtgcgggaagctcggcgcggcggcggcggcgttcctggccgtgtgcgcgctggcgctggcgctgtgcgcgtcgcacgcggcgccggagcggctgcggcgcgcgctggcgagcgtgagccggcggaggacggagccggtgatcgtcagcatccaccaggtgcagcccggcgtcgtcggcgtcggcgccggcggcgagctggcggacgacgggctgggcgggccgccgtcgtgcgtctggcagaagaacatcctcatgggcggcaagtgccagctccccgagttctccggcgtcatcaactacgacgccgccggcaacatcgtcgcgccgtccggccgcccccgcgccgccgtgccggcggcgctaggctggtgaagagatggatacaggcagtacgacatgcccgtggcgacatgaagataatttgcagagagtgacacgcgtgcgtcgtgtagatttttatttcttccatcctattttgtgaagatattttgatgaatgaaatgaaataagcaattcggatgctaaatttgcaacctggaatttatgctcttgattcatatgggatcaacgtgccaatgtgaaaagtacgcctggaagacaaatgaggttgtgtttgtttgtttccttttccaactcatgcatgcttttcaaacggctaaataaatttttttattaaagttgttttaaaaaattatattaatctatttttcgaaaaaagctaattcttaatcactactacgagaccggctttcccgtgtgggtgggcggcccgcacgaatccaacggtctgcgaaaatcgcgatttttgcgtgcaggtgcttatgttgcccgcacggaaaaacaaaaatccggaaatttttttttcaaaaaaacgaatccggtggcggcgccatcgcctcttcctcctcctcgtcatcgtcgtcctcctcattgtcttcctcattgtcagcggcggctgaggacgccgctcccgctctcatcatcggcggcggcggcctctgcgccgccggccgacggattcgccctcccgccgacctccgcgctcccttcctgccgcaccgccgccaacgccctcccctctgctggatctggggagggaaggaaggggaggggaggggagcgggatcccgcgggggagggcagctggccgctggatccttgtggggcttggccaccacccgccagatcccgcgtgccgtcgccacgccgccgccactaccgtcgtcggggagggaaggaaggggaggggaggagagcagagggcaggagcgaaagtggagacagtaatagaggagatgagaaaaagaggagaggagagaaagtgggtaggagggaaagagagggtgggtatttttccgagtagttctcttaataggtcggtacgtgaaaatatgctgtccaaagaccacacggaaaaatcgatttttccatgtggtcctcttaaatggaccgcacgtaaaaataggtcatattttcctaaacgcgaccagttctgcaatgaaaaatcttttgtatagtagtgaattaatcatgtgctaatgagtttctccgttttgtgtacacgggagattagttcccaactgcagcaaacgaactcagccacaaattatttgatcgaacattgaaaaaaataattttggcaaaacttttataccagtattcttcattgtttaaatgtgtgaggttaaaaacataaaattaaaaacaataaattaattttgaaatttaaaatcaataatggtttacaaatcacatctcacacaggcctagccaataatgtctttcaaatcacattctcaagtcctcacacattcaatgctgtagatagatagctatgccaaaaccatctttattcccccaaataaaaaaagcaaatacccacccaacaatgagaccgcgtattaattcaggtcacccaaatttgcaacacatttcctctttcttttcataccaagaaaaaaaaaactcgtgatcgtcatttcccctttgactcgcgacgactgatgacgagttgacgacgacccacttgcggccactttccttcactcccaagggcaaaaccgtcattacggtgaggcaaagcttgcccccgtattaacgttgccgcctctctccgagggcaaaaccgtcatttcgctgaggcaaagcttttcccccgtattaacgttgccgcctcgctccactcacactcaggccggtttgagagtgtagcgtctgcgtctcttctcttgttgcttcggcttctccgaggttggaggaggcgagctgcgagctgcgagcgccatggcagccagctgcctcgcgcagaccaatgccctcttcaggaaaagcctcgtcatccaggtgatggcctgatggcctctcgatcgatcttgctcttcgtttttcgggctcgatttcgtcgagccgtagagtttttatcagcagaattatgcctttctttgaaagaacatttttgtggcttcttcgttatcttgcttggatgattcagtagtcagaaacttagaatcagtgaagaaatgcttcttgtttagtggtggttttttttctgctcgcggatttgggtgaaaagaagtcgcatgttcaggggattagttctcgttatgttcaatgcggtgattccgatgctgcacgattttttgtttttttttctgattccaagattcgatttcccacccattttgctatgtttgttcataccaagattgtttttcttcgtcaagattagtcacccatggagctcgattttgctgttcttgtgtgcagaggcgggcggggaagacgaactgctgcatcgtcctcttcccgctgctcctcttctcggccatcgggggcctccagatcgccatcaacgtcgagatgctgcgggagttcgccgccgccgcctccatcgactgcggcgggtgcggcggcggcgttgccgtggcggcgaacgccacgggggggttggactgcccgacgcggtgcgcgctgccgcgtgcccccaagtggccgccccttctgcagatcccgccgccggagcgccgcgccgtcggggacggggacctcctctcgtccgccggcgatctccccgacgccgcctcgtgcagagccgccgggtcctgcgccgccgccttccttgtcaccggcggcaaccgatcgtttgtagcaagtatgctcctttttcttttcttttggtgcagttacaaggttgtgctcttgtcccgttgttttattttttttaaaaaaaaatttaccatccttaaaaatgtatcgggaagtactatcttcgtcctaaaatattgctacctagtataaaattaccgggtcggccgaaggattggccgaccaaattttattaagaagaaaatgagggttacaagtgtttacaagatcgtcctaaaggagtgtttacctagtataaaataggatactaacgagtagcattatgagtctggatataaacatattttcaaatgtaaaacttgatatctctaagtagtaggtatctcgaggtactaaaatgtaaaatctaggtacatccggatactttttaaggactataaaatttctccttttttaagactgaaaatggtttacatctccgatctctattgacatgcatatgttgacttgtagttttactctgacggtgaacagtctttcagtctttgatagcttgatctgcatgcaggggtgatggacaatatgttccctgctcataattcttcggcgaaactaccgtctgacatttccgctttgtctgattatgttctggttagtgtccttgatttcagtgtgacctttgttctggttgatctttttttttaaagaatagtatgtattagtgctgcgtatgtttagaagatggaaaagtgttgaggcattttgtgatgtatctataattgcaggcagaggcagatgatgagttggatttcaattcctttgaagtcagctcctttcttcagaagacatgcaccccaaaccagacactttcttttacatatcaaagtggcaatacaaccgagactaaacgtaagtttttctacatgtaagatacaaaagttgggttgcacattgtttagtagaaaaatgtgccgtaccaatggtgtcaactattctcaatactggtctattaaggttctaatgaacatggaaaagtgaataaattcatttacagacattttctctgttttcaaaactagcaatgttattacaacttagttattctaatgtttacttggacatggaatagatgtgcaatgtacccaaggattaatgctctggcgtgacagtttgtggctcatcaacgatgaactctatagaggttactaccaaggaaataataagaagaagaccaatgaaatcgctgcaggtaatctccaatgtgccctcaatcagttcttcaaatctgccactcattaacattgaattcattgtttgcagcttatgacttcttaagttctgatcaaggcaactttaacgtgttcatctcgtataactcaacaaaaaagtttgatgcttatgaacaagacatctcactcacttttaatcaaggagcatggcaagcacctagattggttcaagtttcacgactaatcaatatggtatccttttttccaagttgaaaagttggacatgtcgataatttacattcattatatcctccctaattgttcatgaatatttgtccatatatcatcgcatatataaccttatcagtgttgcacgcataccattctcaaatctgtattttaccactcatttgtgtactattctgtttactagctatttgatgatttcttatgcttcatcactgctctgcatttcatatagtttaaacattgcaggcttcaaatgcataccttcacctaagggccagtggcctcaagatctcatttgattttgtcaaagacatgcccagagcagctcgaccaatgaggccaattgatatatcctcattaatagggcaacttccttatgtatggactatggaacttcttttcccggtatgaatattgcaccagtttatttgaatcatgtgtgactttttgtgacacttttacaagcaaataactgagctgcaagcttaatttgtaatgtttaatgaattaatactctaggtaattttgaccaacattgtatacgagaagcaaaagaagctaaggattatgatgaagatgcatggtcttggtgatttttcatattggactatctcgtactgctatttttttcttctttcgctgctctatgtgatgtccttcacattatttggttctgttcttggtaagacaatcttttttatctaggatgtattcagtgattttggtctcagaattctgatatttcacctatttttcttagttcctggtttgatacaagaaaaaagaaacctcatggaaaaattataaattggaggcaagttgcttatgcttgtacctttatctgttttcaggtttaagattctttcgactgaacgactacagtgtgcagtttgtgtattacttcgcctatatgaatttacaaatttcgttcgcatttcttactgcgtcatgcttttctagtgtgaggacagctactggtatgctttgatatataagtaatctcagtatatccattttgtcagattatgaaatttactttgattatttggcatattgtgcctcagtgacaggatacttctacataattggttctggccttttaggagaattcttattcaggtcctatgttgaagatgttttcctctcaagtatgtacaagtttatcttttacaatgataccgtaattctttgttcgctgtatccattttgtcccttccattattacaattgtgcttatgtttttctcttgctagtcttgctatagtggccataggatctttctttttatttggctgtgtatgaggctatgagctgtcgtcatggtaactttcttagttttcctttaatagaaatcattttttttcagttgaatctacttaataatcaataaaaacatactgtctttttgaatcaaagctgtattttgtttcattatctaaaaaaaatgcatgttttcctttgcatataacagatggttctttatacccgatgaatgtaggattaaaatggtggtgtctaattagtaaagataaatatgtgggatatttttatgcagccaatatctatgattttagtgtttttctcatgtcagtgtctatcactattttccaataattttgtggaaattttgtatttgttcgtctcaaggaagctggattacacttttggagcttttccctgcattttcattgtatcgcattatctatgagtttgcacaatctgcattgctcgggaattatatgaactcttccgggatgaagtgggttgacttgaatgatcccaaaaatggaatgagaagtgttttgaccataatggtactagaatggtttctgttccttttattggcattctatttggatcacttcggttccttccaaaagggaataagaaaagcagcagtactatttcactcgcacattgataagaatcgttttcaagctactcagcagaccatccagcttcaagagttcaaagcttctgctgacaatgagaagacagatgttatcaaagaggtatgctcttttgttctgtatattcctgtaatttctaaagaaaatgatggatatgaaaggaaggatattcatattgatggtattaagcaggggtaagtctcgaacccagaccggctagcccaccaacttgtggtgctagctggtaagactcctggtctttctgaccatttatgttaagctttctaatcataggctagaagcagcttatatgtcagtttatcctttatagtatggcacgtcaaaagttagcttggatacttggagtctcactttatcttatttttaccttccttttttctttttaccaaacttcaatgctgtatggaatacaaatacataagatagtttaaacaagcataatatgttgaaattagtcctgcatgtatgtatttgcacagagcatcatgagtattaattttgttctatcatgatttctcagagagaaacggttgaacagatcttacaagaatcaaagaatagctactcgatcatctgtgacaaccttaagaaagtgtaccatggaaaagatgggaatgcaaaaaaaattgctgtcagagggctatctctttctatgccacgtgggcaatgttttggtgttcttggaccaaatggcgctggaaaaaccactcttattaacatggtaagtatgatttaattttagatcttaataataaaagaaataaataatatatttagatagccataaatctctagtatgtaaagtacaggccactttcaaggccaggaacaggcatatacatttctaaaaatctgaaaacatgtctaggtagtaagaaatgatccagattttctgtttgtcacaaatgatccctatatagattacttacaaatataactgatgtttcatttggtcacatgacattattggttaagggggttaattcttatcctgacaacagttgactggatttactaaacctacgtctggcacggcgtacattgaaggaatggacatacaattcgagatgaacaagatttatgcaggaatcggtgtttgtccacagcatgagtaatctaatctcactctgatgtttctgaattacagttttgtttagtttaggacagcctttaaggcaatttagtattggtgaacttaaattaaatttcccccttcttttattttcttgttgcagcttgctatgggaaacactgactggtcgcgagcatctgttgttctatggtagacttaagaatttgcggggtgcaccattatctcaggtaatatgtgaccatttggtaaataacgtactacctctgtatttaaatatataattttgttgattttatccagtcttagtgcacaactttagctactatttttattttggaatatagcgataatatctaacgaaactataatattgtaaaagcaattataatttataagtaaaattctacccatatgatttttatgttttcaaactaaatatcttgagagctattgatagtcaaagttttaaaagtttgacccaataaagtcaataatgtcggaagaagtaatatatggtgatttttttccatggatgaacatgatggattcgacttcaaacactatttacaagtgaaagatgagcttatcatctgcacataagatccaagacacattatcgtccaaggcgctttagcacagattattataaatactggttcaacaaacattttcccagtagttattctgttcttatgtggttatgatttcacgagaaattattataaaatacaagttctgaagcaatcatctaagatctcatatttcttattttataggccattgagaaatctttgaaaagtgtgcgcctgtttgctggtggcattgccgataagcttgtaagcaaatacagtggtggcatgaaacgtcgtctcagtgttgcaatctctctaattggtgaccctaaggtacaattcatatatgtcaaattcagggaaattttgaacattcttgcatgtataaatcatgcattttttaacattctgcaggtagtttatatggatgaaccaagctcagggttggacccagcatcaaggaaagacttgtggaatgctgtcaagtctgccaagcaggacagggccataattctcacaagtactgcactttgctttcaactctgatacaacagtataaccttagtccagttaatcaccatggaaatcttttgcaccacatcatattatcacatcatactttcacctatttccagcgcattcgatggaagaagctgaatttctatgcgatcggataggaattatcgcaaacggcagcttgcaatgcatcgggaactctaaagaggtacatctacacatgtaaactgatcacatatttcatatatggccattgatcccaaatgctaacttagtaacttgaacccccaaaatctcgcctttccagctgaaagcaaaatatggaggctcatatgtcctcacagtaacaaccgcgacaggcgaggcggaggagatgaggagactggtccagtccatctcccctaccatgaacattgtgtaccacatctccgggacgcagaagttcgagatggcgaagcaggaggtgaggatctctcaagttttccgggccatggagcatgcgaagctcaggatgaacgttcttgcctggggcttggctgacacaacgctggaggatgtcttcatcagagttgccagggagagtgacagtgcatcatcctccgtggcctgatcagtaaccatgaagaattgttcatctcatggttggagtagcctaagatgttggggaacttcttgtttttttaacgaaccagtactagatgtcctaatttcattgaataaagtaggagtaaaaattttgtataagtaaaaaggagaaccgcacaaaaagtaaaaccaaggatgagctatgagcaggggtggcaaaatgcaagggctgagttcaaaaagagttgtactaaaaattaatacattttttagctaaaaatatttaaaggctgaagtgggttgtgaaagcgcccacgggccctaattcactactacccctagcttcgagagacgtttcgctctggctaagagcaagtttaggagtatagccaactactggctacaattcatctatagccaatctaatagctcatttatacaatagttacacactacactattaatacctgatcccacctatcgtacacactgtgtcttggagttcgtgttacagctggctacaaatatgtagtccgctgctcttctcttttctcatttatctccttaaaatatgtttgcagctgacttatagcctgctattgtacctgaagctcaggtcttgacttcctccttgatttttgtcaccgtcgttattgtggagagctttttatgttggaacttggaaggctctttggctcattttcttttacaaatcccaagcagattctgtttggtataccttagggaaacttcaggcctaatctttcagtggtcagacgcagaatcaatccacttgttcgtcctctcaaaacaagcataatattagtatacattataatcagaacctgtggctgattgagcaggatttgacactacagttcgaactgtatactactctattgactgatggactgcccactcctagctggctagcaagtagcaagtagagaagctgcattgtcatagcaaaaccgcgtcgttgcgtttatcttgtatatatatggggggcaaagccttggacgtgagaactacagccgagtgatctaccagcttcagatttcagagagcgattgatcaagtgtagtagagcgagctccatctgcggccatgggagcagctcgtcggcttcgcttcgggctacgagcgccagcggcgtcggccatgtcggtcctactactgctgctgccgtcgtcgctttcgctcgcgctctcgccgccgccgccgccgcccttcttccctccgcagtgggcgccgccggtggccggcggcggtggccctttcgctggtgaggacgcacgccggtggaacatttcctctgatttgtactctggtttcagatgaagttattggtttttaacattactaatagaagtttaaaatggtatattagattattttattgtctttcatttatattttactatagaaatatgggacatttatttatgaaaaggataaacttgaaataaaaggtaaaatagtgtatagacgttctgaaactacttgcaatgcatttcggataagaggaaatagtcatatatgaacatatgctgcctattgggtaaaggaaaaaaataatatattaatactcaaaacaaaaccatgtttaaaaatttactgcataaatttatttaaagatgttgattttgtaaaaggtggaggtggatatggaagtggagccggaggtggtggacccggcggggttcacgagcctccaatctcttacgtgtacaacaacccgtacatacctataggcaagtgtatttcacttgaaaatttagctacttgtagaaaaaatagtttatcaatctagaaaaatatgtaagagttttctttaaaatatgagacaattttatttttgaaagtagtagcattttggaaagggtaataaacatggaatggaaatagaaaaggtgtataaaagctgtaaaactactcaactgtactgcatattagaaccagaggaaatatctacatataacatcggttagctattagttaaggaaaaatataacatattctaatacacgaaattcaacttggtttaaaatttacataattgctttgtagaacatggagatggatatggtagtggtcccaacggggctcacaatcctccaatctcgtccgtgcatggcaaccaatacatgccgacaggcaagtgtattccaccagaaaatgtagttacatgtagaaaaaagaagagccttttaaccatctttcttttcaagtacgacactttaaccatcttgggtgcacaagatataatcctatatacatataactaataagatgtatcgaacttatttgtctaaatattaatcatagaacttttcctaggttataaatagtaccatgacttggtactatttttaaagttgataattaagaatcctcgaaaaaacatggtaggaaaatcgtccgtttgtacccataaaagtatatgtaaatattccttcacttttcccctctaaatttatagcagcattattataaactgaattgcttttgcttccgtaggtcgacgtggaatgtatcgttggccaggccccaggacatagcaagccaatctaagggtttatttgggggagctttaaattttgagaagcagctgtttggtagccagcttctgagaatctggaaaagctctgaaacctagcttttatatcttctggctttttagttcatttttcagaatcttagactgtttggggcagcttctagcagaagcagcttttaggaaaagctgcagctgggacaaactctcccaaacagggcctaagtagcacatagatcacatctattttaaattcttctgaaacttgttgatgtgtgtccattgccaaagactggagatataatctattttcattattaaaaaaatagcacatagctagaaattcatgcccaaaagtttgtattcgagtctatgtaaatttgctccaaacgtatctgaaactgttgaataaagatgaactatctgctcatacgaataaaattatttgaaactaggaaagaccgatatgtggtggttcatctggttcaaatcatgctgctcataaatatcacaccacgaaaatgctttcaataaaattgtaactatattaagagtgtttcttataggatgtgttaaagcgcacattcatgcgtatatgcgcatgtgtatgtcttcccttaaatgaaaaaaatatgtaatttttaaaaaataaaatgaaaaaaaagtttggaatttacatgagatttttttgagaggaaaaaaaacttgctactagaaagttaattaagagagagaatggaatacatctatgaggacggcctgcccacagcccaacatcaacaaggcccgacccaaccttgttttgtcaccctccctttctctctttctccaactcttcgacggcgtcgaccctgtcgcgccgccgcggagcggcggaggaagacgagacgatgggcggcgcaggcgcggcggaaggcggcaggtttgccaggccggcgccgtcttctccaaggtcagcgtgctactgcttttctgaattttttgcgtatgcctgtgtgtgctggatttcgtgtatggacttcgaacgcgcgtggcgtgtttgtggaaatgcctctgaaagtagtagcgcgcagcacgcactaacgcacttgggcgggcgcagctgtgtgcccgttttgctctatgcgcgttattatgcctgttgtgtggtgtgagttgtgccgctgactaactaccgtggaattgtaaccatatcttgggtgtgtcgacagcctgctaacattgcatttggtgctgtcctaattcctaaacacataatagattcatgaggttatttatatacagtggagaacgcagaacaaaattttaggaggtgctagtttaaaagaccaatataagattatcattaaaatacgtagtaccactaagtcatgaacattatcaaagcttttgttgttgatttatactgtcatgggctgagctaagaaaagttagcaaaaatggtttaattgggttagatctgttgatgaccaatactagcatcaatggctgctaaatctgtgttgacatgtgtctgcttgcctcccttgaacgagtggctgcagcctatacgcaatactgtaccgtgaagccatgagattggcttgtattagtgtggacttggttcctgaataaggtatggtttccagggggcctggcggcagtaggtgtgcctgagccctatttgaccccctgctgtgtctgcccctgtttatatataggcttagttatggtaatagaagtagccttacacagtagttgcaaagcaacatagctttgcacaccaccggggagttattcacactacttttcctccactggaaagctcaaggaatgcttgcttgatggactgtagttcagtagaaacttgtgccatccctaaccggtcttttggtgatgccatggagcacatgagggccaccttaaccaatgggaggacacaactttgcatcagttcggagtttccaccatccaaatcattgtgtagcatgttggggtctaaaatctcagttactctgtggggaaatgcagcatccacacgatcgtggaggctcaaaccatcattgaatttttcatcagttggacgctttccagttaatatctctaacaacaacactccatagctgtagacatcacccttcgttgatatttgcccacccattccgtactctgcattttcatttgaaaacataagaatggcgaatggaggaaaactacaatccatgtaacattggataagttaataagatggctgaagcatacaggtcaataaatcagtataagtttccaatttctctcacctggtgcaatatatccaatggatccttttaagtcagccaaacttgtagagttaccaggcgctgctgttgaattagcacccataaatcttgccaacccaaagtcactgacatatgcagtcatttcaagatccaaaagaacattgcttggtttgatgtcacaatgtattagtggggatacacactggttgtgaagataatctaaagcgtatgcaatgtccaaggctaagctaatcctttcacccaaagttaggaatctctttttaccatgtccatggtcctctggatgtagccacatttccagacttccatttggcatatactgaaagacaagtgctttaaaatcatagccatttggatcaatcgtagagcataaagtaatgattttgacaagatttcgatggcgaatatatcttaatgcctcgcactccgcattgaagcttgtgggtgctccgtacttgttaagatcgaaaaccttaatagcaactggattggtctcaaacggcaacatgcccttgtaaacagccccaaaggatcccaaaccaaccaaatttgtgggagagaacccatctgttgcattggcaatatcttcatatgatatctttctcatgttcacactggattgctgcaaagatggtttttgttttcttctcttgatgagaacagccattaaacataacaataaaattacaacagacactgcgattggaattactattttcaaaatagtagacttgtgtttactttgtgatcctgattcacggcaaaggggcaggctataccctggatcattcacacacaatctgtagtttccgtccaagatagccctgctagcattaccaaagacaccatttgatggtattggcccttcaaagtcattgaatgaaaggttgagtttctgcaaagaacttaagagagtgaggaactctggaacttttcctgacaagctgttacgagagagatccagctccttgatgctttttaagttcatgaaagattgtggaatgcttccagtaagaaggttcccttccatgtgaaggtattccaaaagcacgcaattccctagagtggacggtatttccccggtcaagcgattgtttgaaatactgatgcttccaagatttatgaggttgccaatttctagtggtatgggcccagtaaacaaattgtgggacaagtccaaactttgtgacagggaagaaatgttgaagacctcacttggcaggctttcaccgaatgaattgtgggacaaatcaagcttctctaattgtctccactgccctaagtttgaaggtatgctcccattgaagttgttcccatctagatgaaactcggttagttgggcaaggttgccaatagaatcaggaataaggcctgagaggttattttgtgccaagcttagaaccagtaagttgctaagatttccaatggtaggtgggatgctcccactaaacatattctcatccaaatacagaacactgagactcttaagattaccaatctctgatggaattgccccagaaagtctgttttgcctgagccacaaccagttgagctgtgagggaagattaccgactgagctaggcaaggttccttggagaaaatttgcatccaaggccaactttttcagttgagtgcagtttgcaagggatgagaggaagctccagtcccctgcttcaagctggttgtatccaagatcaaggtcctgcaagtttggcaaggatccaaaagatggcactataccagtgagaccagcagcagcaagataaaccatttctagcttggacatattgcgaagagaagctgggatcggcccatttaactgtgttgttgataggattaatgcttcaaggtttggaagtctgttgcctatatctggtggtagttggccgatgagtgagttattggccatgctaagatatttcaaagatgatatgttgaaaatagcctgtggcacatgaccagacaaattgttgtatgtgagaactagcctctctagggttgggatcttacttaggctctcagggatgctccccaccaagttatttgcttttaaagaaacatgaaccaaggaagaaaggttgcccagtgaggctggtatccctcctgtgagtttattctgctctaaagtaaggtattgaataggtgcagcaattgctgtaacaggtggtatggaaccaactaagttgttacggtccaggtaaatggttctcaatgtggagctgttgaagagggctggagggatctcccctgtaagactattttgtgtgagcctaagcacttgaagggatgagctatttgccaagaactctgggattcctcctgtgagctgattgcccccaagattaacatatacaaaagatgggctactgcccaacaatggtggtatgtcacctctgagggcgttgctagagagatccaaagttttcagctcaggaagcgtcccaaatccagtgggtatactgccttcaagcttgttgttgtatagtataacttgctggaggtgagtgcattgggttaagctttgtggtatctcaccttggagggagttgttcgataagccgagtaccttgagattgctgcatgaggacagctcatctggaatacggccttcaagagagttgatgctcaagttcaggtagctgatttgtctcaagcgtccgagctcacttggaatttttccaaggaacgcgtttcttgataagtcaaggcttgtgatggagctcagattggcaatgcaaggtggtattgaaccactgaggcctttggagctgacgttgagcgccatgactcggagttgggtctgggtgttgttgcatgaaacaccctgccagttgcagaagttctgggaagtgttgctccatgagcttaaggatccgtttggatcagagatttgagacttgaagcagagcagggcttctctatcagtatcagtgtcatcgctgattgctaatggcagagagcatgagatgatgaaaacagccaagagtggaatgaattttgggcatggagcaaacaagcggatcatcttgctgttcgtgctgtggctttctcttgcttatggcattttaagtgcaggcaggcacacacttgtcttatattcgtatattccaatgattgtgcctacttctttttgcccaaatgaaaactgttttctaactctgggaaggaaggtatgaatcagctgctgcattgtttcttagtcagaactttgagttgacttcattttctcaggtcaatcacatattatgtgcttggttactttatactgtcgaatattggtggagatgcctaatgtgatgtcctccatccattattgactgaaggattacattatatataattatatatgattttagatgggatagtggtgcctaacttctatttcaaagatatccaactgtgaatatctgatgtgtgtgatcatttagcattgtgttcacatatgatggtgccagttgagtttggtggtgaaaattgactgcaaaatttgcatgctgataaatgagttggacgggtagatgcacaacactaaaataatatctaccattgttgactagaatcctcttctacatgcttctttctcacgtaactgacttttcgcatgctatccaatatccagtccacaaggcgtattggttccatgtaatttctgaatatgcccatgtagtgatcgacctatgtgctatttggctttattttgtttactgaatagcaagctaggggaagctagaaccatcagctaaagatatgctaattatcaaaaatctattgatttccggtgccctatgtggtaagtagtacaaggcatgacttaacgacttataattcactcaaactaaattattgccaggcagctatatgatttctagttttaaatgctacaatttgatgtgttgtaaacagcagatgtgcaagccagacttcttaattcatttgaacatgcctcattatcccaaccaggagatggaatcgtaggtagtcttcttgactggtcaaataaaggcatcactatggtttgcatttgcatatggtcctaaccatacatacaataaatattactgatatacttgtacatttaattattagcttgttatgtttcttttcaggatcttggtgcctgtggtagcaagagaggaagtccatccattggatgagatttttgagacatcgcctgtacatcaaccaaggatggaactgatcaactgtagatccagctaaaaattgcattttttttaacgcaaagaaaagattgacaaggtaatattacgtcaataatcacattatctgttttacccagatggacagttgttgatgaatttatataggtaggaagatgacaacgtacttgacttgcgtgaattttgcatggtcaccaccatgtatttttttgctgacaatgatgttccacttgctagttaccttgtgtaattattgctgacgttacttttgcatggtcaccaccatgtattttttagctgacaatgatgttccacttgttagttaacttgtgtaaattcaaaactaattacgtcaggttggaatattacacagtatactaacggtttcagccaaaagaatgagacagaaacagagggtgccgacttgacacggtcttgtaactcttgttgaactttgatatatagaacatagcagctgtttcaaacaatgttttcaagggtttcagaccatgatgtgtgctttgaagagtggagtactgacaacaagtgatcatagcatatatttttcttatgcgagtgtgaccacaaactggttagtacgggtattagttacttctgttgagttggtcatcaggctaatcagaaatatcagatgggacctgatgacttttgaggtatgtgagttcagagtcaaagatagcacacaaaatcttcaacctggagagctctgttggtgctgtggcttgctttcgctcatgacattttaagtgcagacaggaacacacttgtcttatactgcttcttgccccaatacgaaagctgtgttctagctctgggaaggaaggaaagtatgaattattgcttcactatttcttagtcagaatttttgagttgacttcattttctcaggtcgatcacatattatatgcttgactacttttataccgtctaatatttgaggagtgaattatatgttgtgcatctcgcatgtcatgtgtgcagatggtagacgtgtgaacaattaaacaatgtgctaacttgatgttataagtaaaactaaccaaaattaaatattcatatacttactgtaataaaatgtgtgaaaacaataaataagatatcttgtttcttgagaattaaggtttctaataaattagagaaaattccaagcatcatgttgggtcttagcgagcacagctgggcttgagttccgtgggtcatgcgtgtactaggctcagtacaccttgcctccaacatctgcattaggctcagtttttttcttcgcttccaaactttaacttcctcttaacaagctttttaaatggttaaatgatgtgtttcttttttaaaaaaaatatatatatatagaagttattaaaaaattgaaataaacccattttttaagtttataattattaatacttaattaatcatgtggtgacttttttcctaaagatgaaagatgaagtgtattacgcaaaacgagacggtattaatgtataattaattgagttttaattattacaaacttgaaaaatagattaatatgatattttagagcaacttaatttcatataagttttcgcgcaaaacgcaccgtttagcatattcgaacgggaccttagtctctttttagacaataaaacaacaacaacaaaaaaaaaagggagataacgtgtattgagcatttcattatgtacaaaacggttagcatacataatgcatcgatggccatgattacgcatgtgcgagaagtccaacggctcttttttttaatgcggcagttccaattatatagataactttgcgtgctgaaaacggattaggtggatacatgcagatcattaaaacaatatgtatagcttccaatgttgactagaaaagtatgatttccacattgcttcttttttaactcccccactagcttggcacttaacttacttttggcatgcggtccataagttaaagagtccttgtaaactaggttgctgactagccaatagagattagaaagaccgacttgaagaccttgctcgcggtgacaaacgggcagaatttgaagtagatatatactagtatatattggctacagggcatcgatcgaccggaccagttcaaatttatgcattgagacccatcagacctgttgagatgggtgacttgttgctgatcaaagactgattactcagtgcagccctgtagagtcatgggttggattgatattatttgatgctgttatatatgatcctaatcttgtccttaggtacttttagtttttgttcttcatatagtgctatatatatactaagaatttataatgagtaatgcaacttttttatatgcaaatgccgcttgtttagatgcaaattgagaaacacctaggggtcttccggctagctccacaaggtggtgggctagacgacctaggttctaagcctcaccccttctaattatttgatattaggtcattccttaatatttgcgtttttttagatgcgaattgtttggatacattttatatgcaaatgatgattctaccatgaatggtgcatcgtctctctttcatcttcttccacagaacccacgagccctggtcggagtgtgggtatccgacaggtgtggagattggggacgttattcacctggtcgttggtttggggctaggggcggggacgttccaatccacctctgccctaccccgttgtcacccctactcctatgtaggttggtggacaaccatccgagctctgtatctacatctgtaattcctatgttccataaaaaattaatttatagttatgaatctagatatatatagcttacatctagatttatagtccgaagttgattttctataggacagagagagtaatgttaattgctctattggttgttgttgatgtatgaaaaaaaagttgtcagcaagccaaaaaaatgtatggaggataaacattggtagcaccttttattcacctaaaacaacttgcttgtaatctttatcaagataaggtacgtaaaataaaacttggaggaaccaagtagtgtcaattgctctgcggactattgttgatgtatgaaaaaaaagttgtctgcaagccaaaaaattgaggatgaacattaataccactttattcacctaaaacaacttgcttacaatgtttatcaagagaaggtaaaataaaacccttatctttaaacccaaagaaaccaaaacccaggttgtgaaacaaccagtagaaagaccttccttccctagctcgcagcttatgtgcaaccatgttcgccgaacgacgaacccaacaacggtattagttgcctagtggatgtggattaggagggttaattatgttctgaaacgaaactccaagtcagattaaatcatgtatgtgaaataaaatgataggagtatatacacataaatgcatgtaaaaacacattaacagtttaacaccactttttctacgcaaaacagtcagttctggatccagatacaacttacccggcccgtcccagttctcatggagtaggattcgaggagaccgtgttgatttgcttagagctaagagacgatgatggcctccatgatgcgtctccctgcccatcagtagctcgacagacttgcttccggtggcgagcgtacatggcagaaatggcataatctgcagtagtaagagggacatcactaggattgcctgcaacccaacactaaggcgagcagctgccattgaatttgcggacccaattcaccggcctctcttcgctgctgcagcatgaagcggcgtccaatttattgcgtgcaacaaattgtcttatgtgttgacctccacctaataagagtttcatcggggtttcagccgatgaggtatctagacgttgcatcggcctacaaggattggatataagttggatttagccgatgacaacaaagattttcattgtttatctaatcttgtggattttatgacatcggacttccagctgatgtatgctttaatcttcggatcagtgcttattctatcatatcattgttagccgattggtttctactggaaattattattgttatattgtattatcatcagccgatcgtctttatttatatcaagtgtcagattctacatcaaacatatagccaatagctcaaaaccctatcgctatcggctggtatcggcatcggctagaatcactccatcggcttgtcagccgatcggtagttttatctgctgtttacatatcttgtcagttgcaggatcaaactgactggcacgctcgcatctcatcaacaacttggatctgtactagagctaagcagatctcacaggccagtgtgtgtttttcgcatcaacaacgtgacaatccagacatcaattctttttttaaaaaatgatggggcccactgtcatatctctcccctcccacctctctccaccaccatgtgtcgtggccgccatcgacaccgccccgtctcccaccatccccctcctcctcctcctcctcctcctcacccaccacctcgccgccgccgtgctcctcctccttgtcaactctccccttccgcccgcaagcacaggcgcctcgatgtcgaggaatgggagtccgttccgcctacctcgtctgaggccgagtaggttttgtggatggtgttggagtggcacgatgcccctgcgctgtccgtggcggcgtcctcccccaccagaagttgccgcggggagtgccttagcaccaacgcctctagcgccatgcttgtccgtaaccgcttaccgtcattgcccatagccatggcatcttcgccgtcactgctagtgccacgctcctcagcttgccatcagcaatgcgatcccgcatattcatagctgtcggcgatggtagcgctgcggcgtttgcatcacgggcagcgccaacggcaatactccccgtatccaccaccagctccttattaggtgatgaccccactagagaagccaccaccgcaaacgatgataacgacgagggtcgtccctgcatatcctcacgagatagccttccctgccgagtggagcaacgcatctacatcctcccctgtcccctcctgttgcagcgcgctcgtcatcaccatccccaactccagatacacctccatcacgcaccggcagatgcggcggcaaagagctcctcctcggccacctctagggtgtgcctcctccttggcctccgtcggcgcatgcgcgaggagagtcatagttgccatagctcctcctcggcctccgccggcacgtgcacgaggagactcgcagcaaacaaggactgaagagaggtagaggaaggttagagggggaagagagggagagtagagataatatgacagacaagtcccaccaattgtttttttaaaatatgctgataggactgccacataggacgaaaacaactccgataccccaccagcccaccccctctgttccagtcgatggctaatggggcgttccccagatcgatgaacaattctctccctgcatcagcttgacgaggtgcagacgacactcctcctctacagctcaaaacttcccgcctccatctccattttccgaggtgccagcggctcaccgtcgatgagccccagcccattttcctttcccaccatgcctggtgcgtcgtctctcttccatcttcttccacaaacccacgagcaccgttcggagtgtggggacctgatgggtgtggggacgggggacattattctcctggtcgttggttcagggccagggatggggatgttccaacccaatccgcccttgccctgccccatttcacccctactcttgggaaggtttgcatgggcagccatcggagctccgtagctacatctctactttctctgtttcactaaaaaaataattaatgatttgaatctagatatagcctatatgtagattcgttgttagaagttgattttctattggacggagggagtaatgtcaagtgctctttcagttgttgttgatgtatgaaaaaaggttgttggcaaggtaaaaaatggtatcaaggataaacattggtagcactttactcacctaaaacaacctgtttataatctttatcaagataaggtaaaataaaacctggaggaactgagtagtgtcaattgctctgccgattgttgttgatgtacgaaaaaaaagtagtcggcaagccaagaaattgaggatgaacactagtaccactttattcacctaaaacgacttgcttacaatctttatcaagagaaggtaaattacaatctttatcaagagaaaaattagaatgaaaaataaaacccttatctttatcaagataaggtaaaataaaatccggagaaaccaaaagttgtccttccttcaccagcctgcagactgcagcctatgtgctaccatgttcgtggaacgacgaacccaacagacggaattagttaccttgttgccgatgattaggagggtcatgttctgaaacgtaactacaagtcagattaaatttttttttaccgggccggccaagaaaggccaaccaaatttacttcagattgaagaatatatacaaatatacaaagtcagattaaatcatgcatgtgaaagaaaatgatatgagtatatatatatatatatatatatatatatatatatatatatatatatatatgtgctcatcagtttgattagagttgcttctctagttcctggtaaaaacacattaacaccactttctacgcaaaattaacaatcagttctggattcagatacaacttacgcggcccggaaaagttctcatggagtaggattcgacgagaccatattgatttggttggagctaagagacgatgatggccttgatgcgtctccttgcccatgatcagtagctcggcagagttacctccggtggcgagcgtacatggcagaaatggcataatctgcagtagtaagagggacatcactagaactgcctgcaacccaacactaaggcgagcagctgccatattgaatttgccgacccgattcaccggcttatcttcgctgctgcagcatgaagaggcgtccaatttattgcgcgcaacaaattgtcttatgtgttgacttagttttctcgggttagcaatatatttcgcacactttatatttaaaaaaggcttgctacctccgtttcatacgattcgctttgactattttctagtattttttagatttaaccaaatttataataaaaaattaacagcaaaacgtacatattgtcaaaaaaaagacacggatattaaggaaagatataacatcaaataattagaagggatgaaagcttcgaacttaggtcgtttaacccaccaccttgtaaagctagccggaagacctttgggtgtttctcaacatattatcaaaatatactaaattttagtttattaaaactaatttggtgttgtaaatgtctaaaatacaaagatatacttgacaaagagaatattacaagtatgtttttagaaagcaaatatcacattttctttgggaggtttctaaatgtattctaacacaaagtttttaaaagttcctcctcgtgttgggtcttagcgagcacagctagagtccaatgggtcatgggtgatgggagtaacacccgacctccaacatctgtattggtcattttttacacatttagaaacaacattgaatttattgtgagataataataaaatgctcaattaatgcacattaagttagtaaatagtacaaaatggttagcgtacagaatacatcgatggccatgattaagcatgcgagcaatcaaatggttcctttttgtttggctcaattcatgttgagttattggtttcaattatatagaaatagtagaacttgcgtgttgaaaagggataagtagacaaggctgataaacagagagattacatgcaggtaactaaaataatactagcttccaatgttgactagaatagtttgatttccacatggctgctttttgactccctcgctatcttggcacacttttggcatgcgctctattcaatgaaacaacgtacgctgtctgatgctgttcgttgaaaaaaaaatacccgtaaagtaaagagtatccttctaaactaggttgctgactgaccaatagagcttagaagactgacttcttcatgtcatgtactcatgtcatgtatattgactacatggcattgatcgaccagaacagttcaaattatacatggagacccatatcagacctgttgagatgggtgacttttgctgatcaacgactggttattactctgtttagccctataagggcatggtttggatatttcatgttgttatccaaatcttgttcttaggcacttgtagtttttgttcatgtagttgctagtaattgttactatatccatctcaaaatataagaacataaaattagataggatattttctagtactacaaatatggacaaactgcttgtagattcgtagtactaataaatgtttcattcaattttaagttctcatattttgggacggaggaagtaacatttacactgctatgtactaggacattatgatatgtagatgcaattttttatatgcaaatgacggtttttagatgcaaattattttaggaatattatttatttgatcatgtttggaagactaactatcaatctgaccctgcattttctaatttgtttatttgactctgcttttaaaaaatgaacatactaggtgagttaatagtgttaagtaaggggcaaatagtccttttgcccttgcttatttgaccttgttatgccttacttgtttgatttgaccctattatgtcatatagtgtatatattcggatctgttgaaatatttgtaataaatttgacatatgtttcatattcaagacaatttagacagatttggcttcaattttgacttcaatttgataaatttaactacaatttgacagaattttaataaattgaagtgaacaagtcaatttcacaaatttgacttcaattttaacatattcttgacaaaataaactgaacaaaatttgacacaattatggcagtttttttacaaaattttgacaatatattatcctattttgtggattccaaattgcattcaatgaagcataaacacatatatggccaaatccaaaagcaaattcatgtatactaatataaaaaggaggagttgcccccctctaatcctaccggtgaaatcacctggttcagtctctaccgtccatctgcgtctctcctaatctcatccgtccgctgtacaccgtagctctatctcttccagcgatttcgcccgatctcatcccaccagcgatgtcgccccccacgcggtgactgcgccgcgcaaatccccggcgcgatgactccgcctactcgctccgcgcctcgctccccgtcgcctcctcgctccgcacatcgctccccgcgcgcatcctcgctctgcacctcctctcctcgcgacgatccaccgccggaccagcgacctcgcctcctcgctccgccgcaacgtcggacctccctcttcctcgcaacggttcagcgacggcgcaccaccgcaccgccataccagcgccgaggctgccgccgcccacgcctatccgccggcgccggcgccgaggaaggccccttccgccgccgccgccaccaccatcgccaccgtgcactcgaggtcgtccctcttccccatcggctgcagcctgagccgacgtcctccccatccgccaccgccgctgccgccgacggagccgaggtcgtccccagccaccgacgccaacggagccgaggtcgtctccagccgatgccgccgttttcctggtatcccattcctagcatcaacttgataatgcagcggatgccctcactttctcatctcaaataattaacaaagtgcgccattttcagctctgctactggttgaagaaatcattcctggcaagcagttgtggatccctaattctggagttctttctccttcacccatgcttacatgctgccatcctcgattactaccaccatggctgcgttgcaaggttgcaacacggtggtggatgtggacttgacagagcagtagcttcacataagtgctttgttatgttatcctcatgaggaagagattgaatggattgagggggattaatttcaggctcaatagatttggaataagtaccttccaaattcccctcaatccacatggggatggatgaactcaacaaggccgaatgcatctcaaatacaagttgtgatgtgaaggtgataatcaagattggaaaacccaggtaagatatgactttaagtggtgcaagttaatcgtgatagcaaatccgtttagtcttattaggaaatgtcatacatgaaagaatgtgattgacaaaaatatttttttagccttctgatttgcagatgctttattggagttgtgctgctcctcgcgacaaacatgaaatggagaagagaagggtatactcacatgcatatattatatattgatatttggcctattgtagaaactattggttttaagcatacatgccctaaaaagcatatggtttctatagtaagggttgataactccatattgatatgttctcttagaaatacatgaaatagaaatttgtgtgacatctagaaaaacaccttgattcacctttctaaaatgcttccagttatgtttaactaatgaactctggataaattaaacttgctgatgcaaaaccataatggatttgtaagaggtaatggctttggatcttcagtgaagagtaatctctattttctcaggttcattaaaggtcaacagggcacgaccagcaaattgattttatggatgttctttcaagaactcacacccttttatttaatcttgtaaatttgatgtgtgattgagtttctagggtcagagcttcaagtgtgattgaagcagatctacattttgtgagagattatgcagagtaaaaacgacgtagtattttctttcataatacaatttgtcatgcttcatttatttttcttatggagcacacacacgttgattttactgcttaaatgatatttggaatacctgatgggaaatccactgatgagtcctatttaacagaaattagtgagatactttttgcaaaatggaacatgatactttctgccaaatgaaacatcttttagccgccctacttgtttcttcacagttaccggtaaaatactctcacagtgacatgtacaacaagctaggaacataaacttaatatgtactagaatgtttaggactatccttatgataattcatgtgctcgatttagcatttcagaatgtacctcatactctcaatggtatagatgcaagataagctggcagctttggttgcgtcaataggttttgttattttcttttttagattctctatcatgagaaaaagctcagcctcttggtattaatgtgaaattgggatatggctcttctgttaccatggaaaattaatttgttgtacgagcaattatatttacatctgtacattagcatacaagcaaaccttcgtttgtacagcctgcactggcataattgggaaattaagcttatccctgtccagaagcatatatctattaaatgattttttagcacgttgttggcaagagaggaactaaagtatgctactgcattgtgtatttttgcttgacacatggaatttgatttgtggaacccaaattaccaaacaatttaagtagatccctccattaccccttttgttagttgcattatataggcacagtttagatggaactctattgaaaatcttacgtaatatcattatagaagagggctgtttgaaaggctggcagcgacaggaggcttactaattgtagtatcgagtatggctactcctctttcttatgttctatttcctgtttacctattcttctttcagtttactgaccattatagcattttggtcaagctcatgtagatatctgtggaagttgtttccttcatatgagtggggcactctagattctatggatgatcttatgttgttttatctttctgtcaaattataatggaagttgtttgaggtactggattgaactaataaggaaaaatcattgtatgtctggttaaatttaaagttgtttcatgttctaaagagttagatctgtactgttgatacttgatagaagtgagatgagagtgtcactccaattgataacccccctcccccccctcccccgaactatggtggtgtatcaaatctgttcaggggcaaggtatgccaacatggcaggaagccactccaaaggattgcttgtgagatgtaaataatacaaccactttctggtattgaatctgggttgcccatgtagtatttttcttggtttttttttcatgttcaagaaaatgcttcaatagaaggatcatttgagattaagaaatgatcctttgaagtttttggtttttttttgtcgctcttaaagcctcatatatcttgcttatttatgctataggggcctaaaataaattatttttacaaacatgatgaagtggaacatttaagattcaaagtggtacataagtatttgctgcaatttcaagtatattaagttattaactggttcacggctggcaacaaaaattttgagacatgaagatttgtggtatttgacattcctgcccctttattctattggtcaatgacatgtatcttgtcgttctgctctgttaatttgttgggatattttattagttactgcagtgtagaaaaggagctacaaatcacatatattttcttgtcaggagagttgcacatcattttattaaaacttgtgtaaccccacaaaatgaaaacttttatgtgaaattattttggttacaatatattgggtttaatttatattttgaacataacgtgcattgcacgtgcacgattactagtgtccaacaacatgcaacaataaaacagtccaacataaacacatcaataggcccaacaaaaccacaccaccaaatccaacggaagcataccatcaggtccaacatcacacatacaggcacaccatcaggtccaacatcacacaaacatgcactaaatagtaggaacatattacatgatcaaccaaagaacacacgatcagctagcctccctctagctcttcccctacccctgccacctccaccacttgcacttgagccaaaccacgaaccttccctccctccagctcttcctcttccccttcccctacccctaccacctccacctccacccccacctcaaaattcctcatgggctatcgggaatatgcaaaataaaccatgtacctcatctagtccgagtctgatttggctttgacccttgtaattgtgtcgttggctaaacccaaggggttgtgtaccctaggacaacccaaggatgaccctataagctatttattcagtagcgtcatcgaattagggttaggttttgcttagactatttttgccattacagtttcgccgctagttcggtttgtggaaccccaaccttgagatcttaatcatttatctacaaattgagttgcaatctaccttgtttttgcttgtgttttatgattcatatgaagggattagccttctcagcgaggtcaaccgagcagcgcacggttgattaccaaaggagacatggtaatgcaattgcagggttcagattgtgttgattggaagccggatcgtgtgtctagtttccaccaaatcgagagttatcagcacctatcgaaagatcgagacctaggtccttagttagtatcagagcacaaattgcttgttaggtataccttctttaagattattagtttcttttatatatacctataactataaaactttcacacaaaattattgcatccattacctagaaattttgagccattgaattgttctattagattttgctttattgaattttatgttgcatgtcgtgtcgagtactagtttagttttagatttattttttttagttttgagtatttcatctcttcgtcaattcgggtttagggttcattagttaagtcgtgtgagttgtatgtcagttttggatgtagttttgcatcatgtcgattgttgttgggacttaaaaaatcgaactaaccatcgccgggtttccgtttttatggtttggagaagttttcatcgagcggttttggagttgctcggttggtaggatttcctattgacttttgtatttcagtccctataatatttatatttacatttaagtctctatttgagatcattggcctgtttctgttgaaaaataatataaaaaagaaaaaaacgcagaaaggtgatatcagaaaacagaaaaaatatcgcaaaaaaagagaaaagagcaaaaaaaaagtaatggtattattctaattcaatatatttataatggcatgaatcaaattaatccgatctctatcccagtctccaaatcctccgagggcgtcgactctaatggctgcgccgagtctgtcacgctgccgccgctgaagacgcgatgggcgacggcgacggcgacggcgagcaagccagtactgcaggcgccgcgatggcggtttcccaggtccggcgccgtcctctgaggtcaggatggtactgcttttctgaccttgcgtgtgcctgtaactgtaatctcaatttcctgtgtttcctttgaatgcgcgtggcatgtttgtggaaatgcctctgtgggagtagcacgcagtacttacgcacgcacgcacatgtgtgcccattttgctctatgcatatccttatgcctgcatgttgtgagttgtgctgctgattaaccactgcagaattattggttttttaagttagaacaatattttggtgtgttccagcctgctgtctgttgtttgctgaccattgcatttgctgctgacccaaacaagttttaggaccaagaggttgattctgtgtggacttaattatggtaatgaaagtagctgtacataatagttgcaatgcagaacagctttgcagtctttgcactaatttcaggaaggaaaaataagaaaaaaaaggcaaacttagctagaaatgcttgcttgatggagtgtcaaatgtactgcctaggtctaattattactcaaaccatttttcctccactggaaagatcaacaaatgcttgcttgatggagtttatttcagtggaaacctgtgccatccctaacctgtccttcggtgatgctatggagcacatgagcgccaccttaaccagtgggaggacacaactttgcatcagttcggagtttccaccatccaaatcattgtgtagcatattggggtctaaaacctcggttaccctgtggggtaatgcagcatccacgcgatcgtggaggctcaaaccatcattgaatttttcatcggttggacgctttccagttaatatctctaacaacagtactccatagctgtagacatcacccttcgttgatatttgcccacccattccgtactctgcattttcatttgaaaacataagaaaggtgaattgtggaaaactacaatccatgtaacattggataagttaataggatggctgaagcatacaagtcaataaatcagtataagtttccaatttctctcacctggtgcaatatatcctatggatccttttaagtcagccaaacttgtagagttactaggctctgctgttgaattagcacacataaatcttgccaacccaaagtcactgacatatgcagtcatttcaagatccaaaagaacattgcttggtttgatgtcacaatgtattagtggggatacacactggttgtgaagataatctatagcgtatgcaatgtccaaggctaagctaatcctttcacccaaagttaggaatctctgcttaccaaggccatggtcctctggatgtagccacatttctagacttccatttggcatatactgaaagacaagtgctttaaaatcatagccatttggatcaaccgtagagcataaagtaatgattttgacaagatttcgatggcgaatatatcttaatgcctcgcactccgcattgaagcttgtgggtgctccgtacttgttgagattgaaaatcttaatagcaactgggttgtcctcaaatgccagaaggcccttgtaaacagccccaaaggatcccaaaccaaccaaatttgtggcagagaacccatctgtcgctttggcaatatcttcatatgatattttcctcaagttcacactggagtgctgcaaatttggttcttcttttcttctcttcatgagaacaaccgttaaacataacaatgaaattacaacagcagacactacgattggaattactattttcaaaacagtagacttgcttttactttgtgatcctgattcagggcaaaagggcaggccataccctggagcattcgcacacaacctgtagttcccacccaagataaccctgctagcattaccaaagacaccatttgatggtattgccccttcaaaatcattgaatgaaaggttgagtttctgcaaagaacttaagagagtgaggaactctggaacttttcctgacaagctgttacgagagagatccagctccttgatgctttttaagttcatgaaagattgtggaatgcttccagtaagaaggttcccttccatgtgaaggtattccaaaagcacgcatttccctagagtggacggtatttcgccgttcaagcgattgtttgaaatactgatacttccaagatttatgaggttgccaatttctagtggtatgggcccagtaaacaaattatgtgacaaatctaaactttttgatagggaagaaatgttgaagacctcacttggaaggcttccaccgaagaaattgtgagagagatcaagcttttctaattgtctccactgccctatgtttgcaggtatactcccattcaagttgttcccatctatataaaactcggttagttgggaaaggctgccaatagaatctggaatatggccagagaggttattttgtgcaaagcttagaaccagtaagttgctaagatttccaatggtaggtgggatgctcccactaaacatattgttatccatatacataacagtgagactctttaggttaccaatctctgatggaattgtcccagaaagtttgttttgcttgagaaacaaccagttgagctgtgagggaagattaccgactgagctaggcaagcttcctcggagaatattgccatccaaggccaactttttcagttgagtgcagtttgcaagggatgagaggaagctccagtcccctgcttcaagctggttgtatgcaagatcaaggtcctgcaagtttggcaaggacccaaaagacggcactacaccggtgagcccagtagcagtaagataaatcatttctagtttggacatattggcaagagaagctgggatcggcccatttaactgtgttgttgataggatcaaggtttcaaggtttggaagcctgttgcctatatctggtggtagtcggccgatgagtgagttattggccattccaagatatttcaaagatgtcatgttgaaaatgttctgtggcacattaccagacaacttgttatatgtaagaactagcctctctagggtttggattttacttaggctctcaggaatgctccccaccaagctatttgctcctagagataaaagaaccatggaagaaaggtttcccagtgaagctggtatccctcctgttagtttattctgtgctagactaaggtattgaataggtgcagcaactgctgtaataggtggtatggaaccaactaagttgttacggttgaggtaaatggttgtcaatttggagctgttgaagagggatggtgggatctcccctgtaagaccattttgcatgagcctaatgacttgcagggatgagctatttgccaagaactctgggattcctcctgtgagctgattgaccccgagatcgacatatataaaagacgggctactgcccaacaatggtggtatgtcacctgtgagggcgttgttggagagatccaatgttttcagctcacgaagcgtcccaaatccggtaggaatttcgccttcaagcttgttgttggaaagcataacttgctggaggtgagtgcattgggttaagcttggtggtatctcaccttggagggagttgttccataagccgagtacctggagatttctgcatgaggtcagctcatctggaatacggccttcaagagaattgatgctcaggttcaggtagctgatttgtcccaaacggccgagctcacttggaatttttccaaggaatgcgttgtttgataagtcgaggcttgcgatggagctcagattgcctatgcaaggtggtattaagccgccaaggcctttggagctgacattgagagccatgactcggagttggggctgtgtgctgttgcatgaaacaccctgccagctgcagaagttcagggatgtattggtccaagagcttaaagctccattaggatcagagatttgggacttgaagcagagcagggcttctctatcagtgtctgtgtcatcactgattgctaatggcagggaacttgagaagatgaagacagccaagagaggaatgagttttgggcaggaagcaaacaagcggatcattttgctgttggtgctgagggcagtgaggcttgctattttgcttatggctaatatgtaggaggaggcacgcacttgccttatatttctgtactccaaggaaatcgggctactgcttctagcctaaaaacaaaatcgtagtccaacacaaaatagtcttatgtgaatgtgatgcattatctcagtctggaatttggtgttctcttcattttctaaggtccgtcatttatttggtaagtcagaagttttgagttgatttggcatgctggattgcttaatgtgatcttcttgatgcaatgcaattgactgagggatacccgacaattaacggttttaaactggagagtggtgctactttgtagtatttcatagataacaaactctgcaatttgcctgatgcgcgtggtcatttgacgggttgaaaaaatgtctgtaccagctcagtttggttgatgactttttaactgaataacttgcatgctgaaaaggactgagttggaccataggtcgatacatgcaccccactaaaataatagcctccgttgttgactagaatactcttctgtccacattgcttctttctgattttgggtctccctagaaatataggcgcgctaagccgctctgaccattataagcaatgtaggtttgatgacctgatggattatatgtactccctccgtgacgtatgattggatgagacattttctgtctgtttatattcgtagtaatagaaaatgtctcatccgatcatatgttcttatattttagaatgaatggagtaccaaaactacaccacaaataaagattatacttatgtctgcttcggcatgcaatagtgctctgcttaaagtagaattagaaaagagtatatagtactagcatattgcccatgcgttacaacgggattttaattaaagaaaattataattaacttgttataattaccatttgtatatatttaatctcttaattcttgcatatattttttactgacatgtggtctatgatccttctggctccataatatcatttttttttcaaaacaaaattagggatttagtagcgagggtggttgacatatggatatggcccctctagctccataatgtttttttccctttccaaaaaaagtagggagtatgtctgagaggattattgttggctcaatccgtaatagtgacatcctagaggcctcccgagctctcccctacccctctttatgaggtttttgtgattattgagaaatgttaagagttgggttgagagatttgaagtttgagagcacaagacaacaaatcccatcactcaagggctccacctaacatttgtgaagcatttgtttctccaagaggtgaaggtagcagcttcacctccacaggggaagaaacaagacagtgaaaagaggaaagcctcttttaaaatggtgtcaccagtctgtcaagcggtgtgctcatcttcagtagaggctcatggacgtggtcgtcgtggcaatgccgcagtcccctgtcaatcacgttcattactgctctttggattatcttggaagatgtttttcttagtttagctaactttacctttggaatggatggtgttgttctttatgtcttatcttttatagcgatgttctgggaatatcatttcctttgtgctccatctgtaatcctcactatataaataaatttatgagtttaattttcaaaaaaagaggaaagcaattgaaaaatacctaatttatttgggagcttcctcaacggggacgtgggattctcggtggagaatccgaactttggaaaacatctttgcgtctctactttggtttgcttgtattttgaattcttgtcttgatttgtgcttttctttaatctactcggttgtgcatgtatttgggtgcaggtgcttcgtggctttacgaaagaacaacatatgacacactgcacattagttgctttgatctagaactcaatttggggttgagatcttttcatttttgtgcttgctggcaaaactggggtatccggtgttgacatactagttccaccatgtatgtagtttcgttaattcgcaggaacgcttattcaaccctccctttaggtgatatcttgatccttccattcacttgtcggagttaagccttcctcgtcacggatcaatcaaaggaaaaaatacaatcactatatcaaataattaaaaccacagtgggatttggttgaaggtgttattaattaagggctcattcaattcgtattacatgctttcgataggtttttcataggaaaccagttcctaagggtttgctagtgtatatgcattcggagcataggattcactccattctgttcccaagcatttctgtaggtccccagtaccttcaaaggaatttcataggaaaaaacagtccactattcctggcccacacatcagttgctgccttgtaccatctaagtacagtaaattagatataggccttgtttagattaaaaaattttagccaaaaacatcacatcaaatgtttggacacatgcatgagacattaaatgtggggaaaaaaaccaattgcacagtttgcatgtaaattacgagacgaatcttttgagcctaattatgccatgatttgacaatgtaatgcgacagtaaggccatcccgaacccagaaactatcaagtagttttcatacttgccatgtcatatagacactatgtgtagaaactatgtatataatggatggtgtctttaaattaaattctcatccaatcacctctcttctctctccttttatccacttatcctcttgtttttattcttggtacttgtgtagagatgttttttgcatgagaaatggttttagaatttttgcttatatggcaatgtatttaatgctatgaaaactagatgacatggagggttggggatggcctaaacatttcctaatgacggattaattaggcctaataaattcgtctcgccgttttcaggcggaatatgtaatttgttttgttattagtctacgtttaatatttcaaatgtgtgtccgtatactttaaaactttacacccaaagaactaaacacgcccataatatgttatcacattactgcttgtagtaatgaatgaatcaagattcctgagttttcctttgcactatccgaatgatagtttttccagtttttgtatattttctaatcctctgtttcacacctacaattctatcatatttctgtgtttttcctattcttaaatttttatcatgtattccgaataagccctaaatgttgacggtagaactatccattttttttttcttttgaggctaaaattatactctaagaagatttggtggaccaaaatgtactccattttttttctgcagcttgtatttgttagttctgtctgagaagctccctagtttctcactgtcaattcgatgaacgtggcacgggctcactctgctctctcaatatacttggcataatattttgcatatcattccgttcaaggtttttcacatgtgagaactcccttcccctcaagatctatgtggtgatcgaacaattcgaatatgtatttatatggcatctgcctatgtaatatatgtcgctttcaaaaatgtcactctacagctgtagagagaggatcaagcgcgatcagtagatcgacaacctgtttggcaccattcaggagatcacaatctggatagaagcaggagtcttcaattgttcaggagagtagcatcctagttgtaagctgatttttgcccctttcttttgggaggatgttttttaagcattctcctagtagctccgacagcctctcgtcgaagtctaaaacctgtttatttgtatatactactaatcttaatgaaatttggccggcctgatctttggccagccccccaaaaaaaaacaactttagagagaggggagagaaagcttagctttgtttaagatatagattataactacaagttcaacaaatattttattatattatatttttgttatgtaattatatattctacaaaaagaagagtaaagtgcacgaacggttcctaaatttaaatttgtgcaggtgtatcatttaggtacatgaactctcaaaatgcatttttcggtcttcaaacttgtcttcgatgttatataggtctaaataggtttcaacccactccatgcgttgatgtggcattctagggtggcgcctacgtgtccgcaggatccacatgtcattcacatagaaaaaactaaaattcaaaaaatattttttctatcacttctgcaatatatataacaatagcattcaatctgatcaagaacacaactccactatacaaaattaaatactgcggttattagcaatataagatctgtacaaaatatattaaaaaataagagaaaaaaaataaaataacatttttgagcgtgtaagtctttcatataatcgaaaaaagtaattacagtgcccgtgcaatatacgggtccacagctaggaaccatgatttaaacccggataaatggagttatatatctccatggctccattaccatacctacagtacttctctgtaaagggccggctcaaattcctagcaacaaggagggttatgtcctgaaacataactcaaagtcagattaaatcatgcacaacgccaaagaaaatgataggagtacatactatatgcttgttagtttgataagaccctgataataagtaatgacacacattaacacttatctcgatgaattaaatgcacgaatcatgaaagggtatgtagcataatgtttgcaatgacctgagtagcatatcaaggttctaagtttaaattttgataggaatgaatttcagattgggttgtttgacgtggggctaagtttccaatttaaaaaaactgtgtatatccggttggatgtagagaccgggtaaaaaatatccttcttaaaaagaaaaaaaaaagatcgatccaactacacctacgcagcttacccggatcccagttgtgcttcactagccgcggcactaggattcgacgacatcgtgtggatttggttggatccaagccttgatgcatctctctgcccatgatcagtagctgggaaggctttctgccatcggtggcgagcgcacacggcagaaataatgtcatctgcagcaagagggacgtcactaggattgcctgcaacccaacgccaacgctaaggcgagcagccatcgaagttcactggcctctctgtaattaatttgctgctagctgcacaaagcacgatcaggctaactgtgtagtacaaattacaaatgcagagttaagaaatacaccggccagcttgcataaataggaggtctatactcgatcgtctgaattttcagcaatgttactttcgttgatttctatttgagtcttaagcaggcaattgaaattggagatcgattatacgatgaccacacatggactagaatgcaagagaaaagaacagtgacaggtgaagtcggaatacatatagggtgtaggagacatttccgagtcctttaaatggtacatgtacaccggccggggtaaatataccaactatcggatgatgaaatctagcaaaaactgtggaaagtaaagtgcaaagtttggtggcaggtattggaactgtgagattgtttatagttaggccaaaaggaaacaaagaggaagatggttcagaatccaccaggaaaaaataagcaaaacagccatgtgagtgcggcgctcgtttaggtttgtttttcgcggtttcggtgtttgcttctttgttggtttagcgacagttggtcacacttagcggcggtcggtccggcgctagccttctcctgggttatgtatatgcgctgttggtgcgtggtggtgtgtttttttccttttcttgcctactgcctctcactatggtagtcttgtaattttctcatgctctatttaatgaatcattgcaccgtctggtgttggtcgaaaaaaaaaacagtcgtgtgagggataccggccaacagtaacaagaaagtgtacagaaattctacggcatgatctagctagcttcatggatttcttttctctgaatttctcaaagggactagtcctctgtcaggatcttcttcaaatatatcaggttgaatattcagttttttggacaatggaagaaatcgcgacctttgcttaaaagaagctacaaccacaacagaatatttagttggatcacgattggtggaattcttcttggttgcctctttaatttggtcgatcacatttttgtgtcaatgaagattatgttggtaaaatgctccaagcttgagtggggacaccaagttcagcactgaaagtggtctgttagcgcctctctctctctctctctggacacacggctttggtaagagatgggaaggggattggaaattcatgggagtcttatttttacttctagtttcttatttggtactagtagagataagaatcatggggagtatggatgtgaattaaattctaagtgatgatatatggctctggtatatctcgtcgtacttagatgggaatttccttccaattacctgtctctatccacgtattgaaaagatgagggttcgctcttatactccccttccaaattcctcctaaaaccccccatgtcgattcaaccaaacaatagatttaaaagttgccacccttcaaactcacattttccccttaacaattccacccaaccaaacacaccaatagagtaattcagcaactcgatccaactaggtccagtgccgcagccaccaagacgcctccaatttatcaagcgagtatttaacccctttttttctctctctccccctcacctactacagccactcagccattttttccactatcccatcttactataaagttataacccactaaattataaagcttaacatgcaaaaatgcacatcatcatccactaacaattattacatcttaaacatcatgtaagtatactatattatctataattctataatttgttaaattttagtgctttgaaatgcaagcatgttaaatcatcatcccacataattcacataatattttaatatatctctccatcatttttttaatatcttatatatgcttatatagttcgccatcacttagttaatattatttctctcttctctcattaagccataccacttcaattgtttattgcccttggatgattaatctatagtttaaattatcttcctctttttttctctcataaagccacatcacattatactttcacatttaaataatcattatatatactatttaaattattgtaaaccacgtcaacatatgtaagcttatatcatccagctatcttacacattatttctatttattgttaccatactaaatttccataataacgcgcggggtttcgcctagttagaagaaagaatgagttacaacccattacatggcccaatgtggctaaacagcacaagaattgggcactcttgttcttggaggcattttctcctccgaaataaatccactttgactccctcaaatatatctccaatctaatttgtatctctcaaccctgtcttgaccctccaactattgaaacagtgtaatttaacctcctcaacggttttgaaagcaattttcgctgacgtggcacgttgaccaagtctaaccagctaagtcagtatgcggtctgatatgttagtcactttttcttctgcttgttttcttttctcttttccttctctctctagcccaacactgcaaggtggttggcgagttccctccattccacagctagtgaagagagggagcccgacactaggagcggtggctcggccttgagacggagtggcggcggagcgaagctaggacgaggagcggtctccgccaatgccttctactcacaatacagagcagggacgaggaacataggtgatgaggagcggcggcatggagcgcactccccatctcacctggtggccgacgctttccaccgcgccatcgccatctccgtcgtcggaatcatgttgcgaacgaggaggtgctcagggtggctgttctacactacgaccacatccggctgctgccgctgcccataccgctcctcgtcggtgctcagggtgaccatgggtgccgagtataggtactgattttaaaataaccggtacctatactatattataactgccggttttaattaaatcaacacctatgagccagtccctattaagggttttctagtacgtcttgttgtcttttgtcgccaaccctaaaagaataattatctgcatatgtgaacactcatgcgaagtttagaacttaaactcacatgggtttgttccaccatacaagatctaatcagtttagctatgctcactttatgagtttagtggtattttgaaacatgtttaataattgttcatcatgtcaaatgtgagccaactttttcttcacagcatatgtgagtaaagctggaataacatgtcctaaaaatgatttcttcggttgtttattgtgcacgcttgtttcaaaggacgagcatgcatgattgatggaaaatatcaaaactagtttactgggggcagatatgcaaaatgttcatggtacaaaatgacgcatgtgaaggaaatgtttccatgatgagtgtagggaagatgccctccattgtaaaatataataatttaaaatcgaattagatatcacctaatactatgaatttggacagtcctatttagggccttctggggaccttctagcagctgcagcttctcccagaatcagaagctccccaaacagtctagcttttggtccagattctgagaagctgtagttgtagaatccaaaaaatgaactagaagccagaagttaggaaatctagcttctccagattctcagaagctggctaccaatcagttgcttctcagaatcttaagctcccccaagcaggctcttagattcatagcactaggaccactttagattcagatttgtagtactagattgtgtataatctaattctaggttatagtattttgaaacagataaaatatctattataaaaatatgtgaattagacttccccctatgtcggagcagggcgaaacaggagctagcatcagagcaaggctaacaatacagccagctgttaattgtatagatatttatagcctatctctcagctcactcatatagtaattagcttttcattataagtatatggtccatccgtctttctcacagattttcttagttcctaaacttaagctggctgtaagtttatatctcgtttcacatctctctcctctcctctctcaagccaaagtgaggtgggcagtatcagcgcatcgtttctcattcatttcccttgtgcgtcattaatagcacaagatccggtatccccgagccccgtcagcaccactctatcctctttctccgtgtgaccgtgcccacctagtttttctattatatagaactaatacggagtacataacacgctatttgttttagaaacacagtacacataacacgctatttttccccgcaatgaatcattctatgcccttcccgcatttgcttttcatctaatttagcgaggatgattcctcatgaaggtcaggtactcaggttggttaaacaaagtgaattatcggtgacaaggacgagagcaaagcgatcgaaaaagagcactatatatagaatttttcacgaagaaatagaaatagtttcacttaattgaaatgagaggaatttttcattagcagacctcgacactgatagatgtgcttgattagcattacaatagtattacaatctcgacgaaataaaaaaaataaacattctataaagttacattagaataaggataacattgtacaattaaacgatgaagaaagtgagtgtaatatatatatgaattgaagctataaactttagtagatcttatcgcgcaaatgccgatcatcctgctagtttgtttgcaagacagtaaggaaatacctatgtcaaattatgcctacacaaggattaaaaccttggtcaatggagttgtttgcccccataactccatcaccacacctacaatacttctccgtaaaattaaggtgcaaactttgtacttggctctgctcaaatcctagcaacaaggagggtcgtgtctcgggtctgaaacatatatataactccaagtcagattaaatcgtggacgtgagagaaaatgataggagagtatatatgctcatcagtttaattaattagcgtagcttctctagtagtctagttcctggtgataacacattaacacttgaataaactgcacatatcagaatatatatagatccatttactacacaaacaataagttctggatcatattataactggggtatttttattattcttgaaaattaaaggtaccgagacctagagataccatttttttaatgtaaagcttagtacatccatgaactagctagatatctcaagttaaaacttttagtataaaaatttgataccttcatgtattttttttaataaaaggactataaaattaatctctcttagcttacgacttaccccacaaaggattaccgccacccgagctgatacgattttgtaggattcgacgagaccgtgtcgatttgcttggagctaagaggagatggccttcatgcttctccctgcccatgatcagtagctcggcagaattgcctccggtggcgagcgtacatggcagaaatggcataatctgcagtagtaaaagggacatcactagagctgcctgcaacctgatgcgaagcctagcagctcccatcgaatgcatcacaaaggattctcttttgctcctgcagaaactaggctcaaatatatacttatctcatctcaaataatgtcaatgctgttgattttcaaatctagtctaaatgggagaattgactgggctgttgaaattggtgatcgattgaacgatgaccacacatggactagaaatgcaaagtatggagctagcgcggcaggtggtcgagatggaatgcatggttggtaggagacttttcctagtctatgaaatgcaaagttaagtactccctctgtcctaatatataagaacatagaatcggatgggatatttcctaatactacgaatggtcctagtttcttatatattggaacggagggagtagtgtcaaagtttggtggcgagtgctggaattgttagattatggagatctgcttgtggcattgttaagatgtaggtacaagaactcaaaaggacacaaatatgcactgtacactaattagttataaccagctatcatttcaatatgtatgatttctccacgtgggagtatgaaagcatgtaaaaaagaaaatattcataaaattcaaataaaattttctcttaaattacttatccaatctataatccgattatactattgtgttcactgcatttaaatctttctaacaaaatcttatataattacgttatgataaaagaaatacatgtgttataaattgctttattatatgtgaaaattactttttaacatatatataaatcaccttttgatttgattaaattacttcttaggcattcataatgttatgaatatgttattttattgttgtttttagttagttcggtagtttgcgccaattcaatttaatttttagatagactcatgttcttacctccacaactggtttacttttagttctgtgctaaattacttttttttgtgttaattattttttataatttgtgtaaaatactttttgtctttattaaatttactttcataaatatctaagaagtgatttaatcaaatccaaaagtaatttatatatatgataaaattaatttacaatatatatttcttttatcttttttagataatggaatagtcatcccggcctttgctcaaagagagctacagctcattattacaatctagcactctaaaacaagtgtagttcagaaatgacataagaaatgaccacacaaaggtaaatttaaccaaaacaagatcaggagaacacattattgaagtctatttgtgaatctccatccataattgacaaaaagctgcataaccgttatctcaagcttacgacatgcaacttttaaaagctcaccatcttcattacacctttgtagttgtgtccaaaaccggagccaataggttgccctgaaaattgcttgcatatatgtaatagatgatgatttgtcaaaaaccatatcattcctacacaaccatatcattcctacacaaccatagagccaaacatattgcagaagctcccatcaatatttcttttatctggatataaccatgcaagatcttgttaataaagatttagttgtaacgaatgctacggtataatgatatgataataataatactcagcttaaaatatatataaggttattaacggagaaaaatagaccgtgcaccagtcaagtccaaacggtgcctatcactgcaccatgtccatacattcccatcgacttccgacggggaatatccatctataccaataggcagttggtcggtataactttttaaccaaccccaacggatgattggcaacccaaattttatggaccgattgttggtcggtaattatgtaaatttttactgacggtcaatctgtcggtaataataaactttggtggcttatggtcggtcggcaaaaagtttccgataccagctcggtaattgtggtgggtcgggaaaaacatgtcggtcggaaaaaatgatatcggtcggcaaatatatgctattggggtcagatggtcgaccagcaaaaatatgttggttgggaaatttctttgccgactagacttgttccaaccattgaagttggtcagcaaaaattttgccaaccgatagtttgtctttgaatgtggtctttgctgactgattgtttgttggggatcttgtttcatccccttctctctcgtgttcatcctctctccttcatcccctcctcccttgaagctatcaaagaaatatgtactatctgcttatacaaataaaattaactcgaatttgcaagggattgaggtatttttctttgacaggaacattggattttattttagagagaattacagtgtaggccatcttttattggcaaaattttactttggacctttcttaaactaatctttccattttgaatcgggtaattttaacattttttcggtttggactaccctcaacgacttcttcatcacccaacaacaacctcactcaaattagtttgggtacaccgatgaacttccttgtctatatgcaagtcatatcttcactagaatgaagggtacatatgaatagtaaatagagctggatgatctaaatcgaaaaaatgacatagttagttagttatctggtacgaagtgaaaagattagtttaaatatgatgtaaattaaaactttaacaataaaagggaaatcgtaaaaggtgacctaaactgcaatttactaaaggggcaatttcgtttttgcccccactttaatctctaatattgattttgcccctactttttagagttttcgtttttgcccccacttttttgaatcgaaaaatatttttgcccctgttttagatggaggagttaacggtgttaaatatgacatttataccctctccacatctatcataaccaacgtagtaaaagtcgcagatcacacgtcatcgcagatcagacagctaattaagctatcttaattagaaccatgtgaccaacacagagctaagcaatggctgcctcctcctccttcgtgtttgcggcggcgctcccaactccacggtggcgcaggtggcggaggcatcgacgacaaacgcctcggtcccaacatgacctcctcgaggctggtcggacgcgcgcaggggatgtacgtcgccgccggcaaggacgcgttgtcgctgatgatgtcgatgaacttcgtgttcgccgacgacggcccgtacaacggcagcagcctcgtcgtgtttggcgccgtgttcagcagcttggccgcttggctgccgaccgctcgacgccgccggccggtcgccgccgcgctgccctctccccgccgcctggcgtgctcgcctcctgctcgcgccgggaggagctgcgcctggccgccgcccgctctccgctgccgccagcgccgccaggtaggtctcgggtttgaccgtgtgcagcgagggtaaaaaggtaaatcactaactaaaaaaatctttatttcctttatttctctttattttactgtcacaaactcggtcccactgacttccatccaaaccaggggtaaacgtctctttcgattaaaaaagtgggggcaaaaacgaaaaccctacaaaatcaatattagagctcaaagtgggggaaaaacgaaattgtccctttactaaaagaaactcaattcgggcccatgagcccaacatcagccaggcccagccaatcttgttgtcccaccgtctctttttctctctccgacggcgtcgagaccatggccgcgccgagcctgtcgcgccgccgccgccgccgaagacgcgatgggcgatggcgacgccgagtcggccggcgcaggacgatggaggtttccccggcccgccgtcgtattccgaggtcagcacgctactgttctatatgcctttgcctatgcttgtgagttcggtttcgtgtacggcctccgaacgcgcgtggcgtgtttgtggaaatgcctctgaaagtagcacgcagtacacgcgcgcgaaggcacgccacaggtgtggccgttttgctctatgcgtatccttacgcctgaatgttgtgagttgtgctgctgactaaccaccgtggaattgttagtttgtaagttattagccatatttggtcgtgctgccagcctgctctctgctgtttgctgaccattgcatttgctgctgccccaaacaaattttaggaccaagaggttaattttgtgtggacttcattatggtaatagaagtagctgtacatagtagttgcaatgcagaacagctttgcactaatctcaggaagcaaaaataagaaggaagacaaccttagctaggtttattttgtggagtgccaaatgtactgcctaggtctaattattactcacactatttttcctccactggaaagatcaagaaattcttgcttgatggagtgtatttcagtggaaacctgcgccatacctaaccggtctttcggtgatgccatcgagcacatgagggccaacttaaccagtgggaggacacaactttgcatcatttcgaagtttccaccatccaaatcattgtgtagcatattggggtctaaaatctcggttactctgtggggaaatgcggtatcaacaagttcatggaggctcctaccatctttgaatttttcatcagttggacgctttccagttaatatctctaacaacagcactccatagctatagacatcacccttcgtggatatttgcgcacccattccatactctgcattttcatttgaaaacataacaaaggtgaatggagaaaaatatgattcacaaagttaataaaatgattgaagcatacaagtaaagaataagtataggtttccaatttctctcacccggtgcaatatatccaatggatccttttaggtcagccaaacttgtagagttaccaggtgcttctgttgaattagcacacataaatcttgccaacccaaagtcactgacatatgcagtcatttcaagatccaaaagaacattgcttggcttcatgtcacaatgtattagtggggatacacactggttgtgaagataatctaaagcgtatgcgatgtccagggctacgttaatcctttcacccaaagttaggaatctctgcttaccatgcccatggtcctctggatgtagccacatttctagactcccattaggcatatactgaaagacaagtgctttaaaatcatagccatttggatcaactgtagagcataatgtaatgattttgacaagatttcgatggcgaatatatcttaatgcctcacactccgcattgaagcttgtgggtgctccgtacttgttgagattgaaaaccttaatagcaactggattgtcctcaaatgccagaaggcccttgtaaacagccccaaaggatcccaaaccaaccaaatttgtggcagagaacccatctgttgctttggcaatatcttcatatgatattttccttaagttcacactggagtgctgctggtttggttcttcttttcttctcttcatgagaacaatagttaaacataacaatgaaattacaacagcagacactacgattggaattactattttcaaaacagtagacttgcttttaatttgtaatcctgattcagggcaaaggggcaggctgtaccctggagcattcgcacacaacctgtagtttccgtccaagataaccctgctagcattaccaaagacaccatttgatggtattgtcccttcaaagtcattgaatgaaaggttgagtttctgcaaagaactaaaaagtgtgaggaactctggaacttttcctgacaatctgttacgagagagatccaactccttgatgctttttaagttcatgaaagattgtggaatgcttccagtaagaaggttcccttccatgtgaaggtattccaaaagcacacatttccctagagtagacggtatatcgccggtcaagcgattgtttgcaatactgatgcttccaaggtttatgaggttgccaatttctggcagtatgggcccagtaaacagattatgtgacaaatccaaattttgtgacagtgaagaaattttaaagacctcacttggcatgcttccactgaatgaattgtgagagaggttaagcttctctaattgtctccactgccctatatttgcaggtatactcccgttgaggttgtttctatctagataaaactcgtttagttgggaaaggttaccaatggaatctggaatacggccagagaggttgttttttgcaaagcttagaaccagtaaatttgtaagatttccaatggtttgtgggatgctcccactaaacatattgtcatccatatacagaatagtgagactcttaaggttaccaatctctgcgggaattgtcccagaaagtttgttttgcttgagccacaaccagtcgagctgtggggcaagattaccaaccgagctaggcaaacttcctttgagaccgttcccatccaagagtaattttttcagttgggtgcagtttgcaagggatgagaggaagctccagtcacctgcttcgagatggttgtacgccagatcaagatatctcaagtttggcaataacccaaaggatggcactaccccggtgagcccagtagcaacaagataaatcatttctagtttggtcatattggcaagagaagctgggatcggcccgtttaactgtattgttgatagaatcaagctttgaaggttaggaagcctgttgcctatatcttgtggtagtcggccgatgagtgagttattggccatttcaagatatctcaaagatgacatgttgaaaatagactctggcacaggaccagacaagttgttgtatgtgagaattagcctctctaaggctgggattttacttaggctctcagggatgctacccaccaagttattagctgctagagaaagacgaacaagggaagaaaggttgcccagtgttggcggtatccctcctgtgagtttattctgtgttagactaaggaattgaataggtgcagcaattgctgtaacaggtggtatagaaccagctaaattgttacggttgaggtaaatggttgtcaatgtggagctgttgaagagggctgctgggatctcccctgtaagactattttgcatgagcctaagcacttgaagggatgagctatttgccaagaactccgggattcttcctgtgagctgattgcctccaagatcaacatatacaaaagacgggctactgcccaacaatggtggtatgtcacctgtgagggcgttgttggagagatccaaagttttcagctcacgaagcgtcccaaatccagtgggtatacggccttcaagcttgttgttgtatagtataacttgctggaggtgagtgcattgagttaagcttggtggtatctcaccttggagggagttgttccataagccgagtacctggagattgctgcatgaggaaagctcatctggaatacggccttcaagagagttgatgctcaagttcaggtagctgatttgtcccaagcgcccgagctcacttggaatttttccaaggaacgcgttgcttgataagtcgaggcttgcgatggagctcagattgccgatgcaaggtggtattgaaccaccaaggcctttggagctgacgttgagtgccatgactcggagttgggtctgtgtgttgttgcatgaaacaccctgccaattgcagaagttctgggaagtattggtccatgagcttaaggctccgttaggatcagagatttgagacttgaagcagagcagggcttctctatcagtatcagtatcatcactgattgctaatggcagggagcatgagatgatgaagatagccaagagtggaatgagttttgggcagggagcaaacaagcggatcatcttgctgttggtgctgtggcttgcttttgcttatggcatttttattgcaggtaggcacacacttgtcttatacttgtaaattccaatgaggtaggcctactgcttctagctccacaacgaaaactgtgttctgaaatgtttaaattagctgctgcattgtttcttatgtcataactttgagttgacttcatttctcaggtcgatcacatattatgtgcttggttactttatactgtcgaatattggtggagatgcctaatgtgatgtcctccatccgttgttgactgaaggattacattatatatagttatatatgattttagatgggagagtggtgcctaagttggatttcaaagatggccaacagtgaatatctgatgcgtgtgatcatttggcactgtgttgactgttgatatatgatagtgccagctgagttttgtggtgaaatttgacttaaaaatttgcatgctgaaaagtactaagacaataagctgataaatgagttggacgggtagatacacaacactaaaataatatctaccattgttgactagaatcctcttcttttgatatgcttctttctgacctttcttacagttacaagcttgcacacctaactgactttcggtatgctatctaatatccagtccacaaggtgcattgagttcatgtagtgacctgcatcttcaaattgctattggcagttccttttttactgaatagcaagctaggggaagcttgaaccatcagttcaatgcatgttaattatcaagatctattgatttccggcgccctacgtgctaattagcgacatataatttactcaaactaaattattgacagacagctatatgatatctagttttaaatgctacagttttatttgttgtaaacagcatatgtgcaagccagacttcttaattcatttgaacatgcctccttatcccaaccaggagctggaattataggtactcttgactggtcatcactattgttttcatttgcgtacggtcctaaccattcatacaataaatattacagatatacttctatatttaatttgcttgttatgtttcttttcaggatgtggttcagattagcctgtggtagcaagagaggaagtccatccattggatgagacttttgagacattgcctgtacatcaaccaaggatggaactgatcaactgtagatccaggtaaacaaaattgtattttttttaacacaaagaacagattgacaaggtaatattacgtcaataatcacatcctctgttttacctagatagacagttgttaatgaatttacataagtaggactagatgacaacgtacttgacgtacgtgaattttgcatggtcaccaccatgtatttttttgctgacaatgatgttccacttgctagttaccttgtgtaattattgatgacgttacttttgcatggtcgccatcatgtaagttttgctgacaaatgatgttccaacttgttagttaacttacgtaaattcaaaactaattacgtcagattggaatattactcagtgctaacgggttcagccaaaagaatggggcaaagaaacagagggtgccgacttgacacggtcttgtaactcttgttgaactttgatatatagccatactaaatatagagtagaacatagcagctgttttcaaacaattttgttcagagttcagaccatgatgtgcttcgaggagtagagtactgacactgaaaagtgatgtctcctatgatgattatactactatatcataatagcatgtattctctgatgttagtatatatatattgaccacatactggttagtatgggtattacttgtgttgagttggtcatcagctaatcaaaaatatcagataggacctgatgacttttgaggctgtgagctcagcgtcaaagatagcacataaaatcaacttatcattaatgtcatcttaacgaacgcgcggttgcattcatctttagctgcattatagtatcaatgtatgataataaaatattgacaaaccttgcaaaccttgacctggctttgcgatatttgaaagacaagtgaaacatattcaaactaccagaaaatcagttcgccttggactattcgttagagctgtccgtaatccttcgaattcgtgtcacaaaagaacgttgctttggacttgtcatagttgatgggcatagctttgactacataatttccttacattaataaaaaaataacatacttatgttagaagaaacctaccttcaatcttatttatacatgtattaggatatactcatgtaggatatatatatatatataggtaaattaactggtgctacccctcccctagaataactattttacacccccctcccatgggtcaaacccacctccccccaccctccctagggcccaaaacccccctcccacctcggtcaaagcgtcctcccgctttagcgaactgatatacgagtgtggagtgtacgctgtgtacgttcaacttgtactcgaaacaaacaattatgccacgtggatggatcatgatttaggcccactaaacgaggccttaacggaaccagcccaatataattagcccattagcccagtatcccacaggtaaatcgacgggcacatctgcgggagcggcggcggcggcgcatctcgcacatagccacgccctgccgccggcgctcacctcctcggagggatgcccgaccgtcgttgtggagacgctgtgtcacacctccgagagtccatcttcgagcactccagtctccaggttagtattattcattatttacatgtttatttgtccactactacattgttcgattacgatttataaccatttagttgtattttattaaatttattttgactcatttcggtgtaatagtacatttcaagatgaagaggtgtggataattgacctctttttactgatgcaatcagttcattctagggacaataggggccagagagctagcgacaccgaccaaaattatccttgtgttagttctagttcctggtcagtggcggcccgatttgtggcatgattagaaaatagtgacatttatcaacgaattatcaaactagttcatatgatatagattaatacaaatgaattttttactcccttggacagctagatttttatttgagtatataattgtgtacatgtgtacagtattgaagttacatgtacccagctccctccgccactgttcctgatttgctatatgatccttggctcagtggaagcatacagttgaaggattgatccatttgaggatttgctgctcatatgatcatatcacaaattcacaatacatgcttgtcatggtcccacatgtcatggatcaccaaagttcacaagaccaagtagactttcttctatattctatatgcaatacatcacaacttatgacaccattggtacaactcccatattgacagatggaccaaatgtatgaccttaaaactatcagccacgcgacttgcaaactcttaaagcatctttgttgctacaacagattgtctccagtatttcttgaatcagtagtgcaccttgtctcaatagtaggcctgcctttgtctctatgttgggaatgtgaattggagagagcattggagttgagtgtcttctaccagaatagcatggtagcaaagctattaaagaaagatattgtttttgcggtattttttaaattataaaagagtgtatgctattagagaatagactcaaacttaaggtatgcttccactgaagctgttgccatgtagaaaaagattggttagtttgacaagattgccaacgaactctggaatatgtccaaagagattattctgtgcaaagcttagaatagagaggttgctcaaatttcctacggtagatggaatatgtccaaagaaattatttcttgcaaatattagatcgcgtatgctgctcagatttcctactgcaggtggaatatatccgaaaaatgaattgtcagagatatcaagcttctctaaatgcttccagtgccataaacttgatggtatactcccactaaagttgttcccatctatatgaaactcgattagttgggcaaggttgccaatggaatctggaatttgtccaaagagatcatttagtgcaaagcttagagcttgtaaattactaagatttcctatggaaggtgggatgtgaccactgaacagattgttatccatatacagaatagtgagactcctaaggttaccaatctccgagggaattgtcccataaattttgttttgcttgagccacaaccactcaagctgtggggcaagattaccaaccgagctaggcaaacttccttcgagactgttaccatccaagcataattttttcagttgggtgcagtttgcaagggatgagaggaagctccagtcacctgcttcaagatggttgtatgccagatcaagatctctcaagtttggcaataacccaaaggacggcactaccccggtgagcccagtagcaacaagataaatcatttctagcttagacatattagcaagagaagctgggattggcccacttagatgtgtcattgataggatcaagctttgtaggtttggaagcctgttaccaatatctggtggtagttggctgatgagagagttattggccatttcaagatattgcaaagatgacatgttgaaaattgactggggcacaggaccagacaagttgttatatgtaagaattaacctctctagttttcggagttcacttaggctcccagggatgctccccaccaggttatttactgctagagaaagacgaaccagggaagaaaggttgcccagtgaggctggtatccctcctctgagtttattcagggctagactaaggaattgaagaggtgcagcaattgctgtaactggtggtatggaacccactaagttgttacggttaaggtaaatggttgtcaacgtggagctgttgaagagggctagtgggatcccccctgtaagattattttgcttgagactaagcacttgaagggatgagctatttgccaagaactccgggattcctcctgtgagctgattgcccccaagatcaacatatacaaaagatgggctactgcccaacaatggtggtatgtcacctgtgagggcgttgttggagagatccaaagttttcaattcatgcagcatcccaaatttggtgggaattctgccttggagcttattattgcaaagcacaacttgctggaggtgagtgcattgtgttaagcttggtggtatctcaccttggagggagttgttgcataagctgagtaccttgagtttgctgcacaaagacagttcatctggaatgtggccttcaagagagttgatgctcaggttgaggtagctgatttgtcccaagtgcccgagctcagctggtattttcccaagaaaggcgttgtttgataagtcgaggcttgcaatggagctcagattgccgatgcaaggtggtattgagccactgagtcctttggagctgatgtttagtcccatgactcggatttgggtctgtgtattgttgcatgaaacaccctgccagttgcagaagtccagggatgtattgctccaagaccttaaggctccattaggatcagagatttgagacttgaagcagagcagggctcctctatcagtatcagtgtcatcactgatcgctattggcagggaacacgagaagatgaagacagccaagagtggaatgagttttgggaaggaagcaaacaagcggatcatcttcgcttgcttttgcttgtggcaacttaagtacagacatgcccgcacttgtcttatacttgtaagttccaatgagttgggcatactgcttctttccccaatgcaaaattgagttcaaactataggaaaaaaggtatgattctgttgcagcattgtttcttatgtcacacatttgagttgacttcattttctcacattgatcacaaattatgtgtttgactgcttcttgccatccaatgttctattatttgtggaaacatctgatgtaatgccatccatgcaacatggactgaaggattacattatacataactatatttgattttatattggagtgtgcctaagttgtgttccaacactgtaatataactgatgtcatttggcactgtgtcaacaaatgtatgcgctgaattttggtgatgacttttaacggaaaaacttgcgtgctgaagaagacaattaagctgataaacagttggatggatagatgcacaacactaaataatagtagcttcctgtgttgacaagaatcctctccattccatattggttctttctgacctgtcttactatcttgcaaacgaaactgacttttggcatgcaatgtattatgcacaaagtgtatttcatgttgagtccatgtaatttgtgaatttatccatgtgacctgtaatttcaaattgctatacctgcagtttcttttatgaatcatttttctgaacacctgtactaataagacattttagtcacatgctactcaagtgattttagatggaacacttctatgcacatagaaaactatccttctaatcagtcttccatatccttcctcattggatggaacacatcaatttccagtgacctatgtggtaaatagtacaaggcaccgcttaacaacttatcatttactacctccatgctaaaatataacaatttctagttatgtatctaggaatacccttgtctagatacataatggatatacccttatccagatacataaccagaaagagttatatttcagaacggagagagtagtttacaaacagcttactgatctagttttatatgccacagtttggtttgttgctatcactttaacagtatacatatctgcaaggcacgcttttgcaacgagccttgcttatccaaccagtaggtaaaattataggcaatggtcgaataaaacatcagtacggttcgcatatgaacctatccatacaacacgtacttctatatgtaatctgcctgtcgcttttcttttcaggacctggttcatattggcctcgggtggcaagcgagggaatctgtgcattcgacgatacttcagacattgcctgttcatgagcgttgatgaagatgagatgaacagtagacccacacaaaaaaaaaaacatgattcttgtaaggcaaagaacggattgacaaggtaatagtattcgagcaatctcatgcatcttctgttttacccagacagacaaccgttgttgaattttcccaggtagcacttgatgtgggtgacttttcatttgcatggtcaccatataatttttactgacagtgttgttccacttgctagttaccttgtgtatgtaattcagaactattacgtcagattagaatattacaaagcagaggagcgtactcgacatggtcttgtaactcctgttggactttgatacacataatatacatcagtcgtattgttcaaacaaatgtgttcaattattcaaaccatgattagaagaatgtcaatgacacttttaaggctacaggacgagtagatgaagtgatgatgttcatgactccttggatgattaccttaccataatttattttcgtatactaaactagtttgaccacaaactggtcgctctatgggctgacgaaaccatcaactgacaataatgctcatatttaccggacgattcacgattccagtcaatttcagctactgacgtgaacaatgtatagtaagttaataatattaccttgacctgacttcactagttttctctacctttgaagtacaactgaagcattcagatgccaaatattcaagccaatacatgccgagaccaagtaggtataataattgtctgtaattaacgtaggaatcatgcaggaattccacccaaaacagatcagtttcatactgaacgagtccacacgaatcagcctaagcagatatcctctctccgtttctaaatatttaacacagttgactcttttaaaatatatttgaccgttcgtcttattaaaaaaattaagtaattattaattattttcctatcatttgattcatggttaaatatatttatatgtatacatatagttttacatatttcataaattttttttagtaagacaaacagtcaaacatgtgctaaaaagtcaacggtgtcaaatatttggaaacggagggagtagcaagtagcaaagctccacgtcgccgtcgttccatcgacgtcgccgctgctggtcgtcgtctccttctcggccggccggccattgaaatagctccctgcatgcgttgcgggaacacacatctcttagctctgaaatctgaattgcgagaacacacatctcttaattagctctgaaatctgaattgagaggccgagcgatcgcaatggcggctgctcgccggaggctccgtgtctcgttgcaggtggcagtactactggtgtccctcttgctgctgcccggatgtctcgccggccgtcgtgagcacgccggaggtgagctctcttgcaaatttgtttctttaattaattgccatgtccttttgttttgtctttttttacattttattaatcaggtgtaatttggttgtcttgattttgaatggattaatgggacttggagatgaacaaagttacacttcgaaggggccggaaattatatatagtgttatcgcttttgatggctaaaaattgatggaaaatcttccagtagctattttcccatttactactgtaatgaaataaatgcatgcatgatcagttgttaaatagtatgaaacagacattacgttttgaaaaattctacaattttcattatattgtcaagttctacaatataccctctgtttttccccctttttttttccatcaccgccagtcaacctccattatctctttgtatttttcataatacctaaaatacccttgcaatatctaatgccattttgctgccagttgcaaataatacaataaaatctactattatttcaatatcagtgaagaaaatatgtgcttgcttagtgtatgttacatttttttaaaggcagaatggacttttcgttggggctaatagaggtcaacaaatggtcaactcatgacaatgacaaaacggtaaaaaaaaatggcttatgtgatggtatattataaaactcgtactcgtcaatgataaatcatataatcgactgtttgttaaggcaaatcatacaatttcacttttattctttttttggaaaacacgaatggcttattgtgctcatctttattttgtttttggttgcagtgaatgtagacaaatctcacgggatagtaatcaactgggagaagaagcatccagtacgtcggttatttctaggcttggcaactaataggcatcgtcgaattctgttctaccgaaatccaggttacttctccgccagttataaattatatgtgcctacttaatgaaatatatcgtagtcgtggtaaattttattagttttattaacttgaaatacattttagaacatgagtaacaacatgtcaaaatttattttctagcggtagtactgaaagtctgtgtttgtagttatataatggagaagtacataatttttttccatgcatgcgtgtttaacaattaaaatatagaaaatgccttgtaatattcttatgattagcaggctttgatcctaatggggaacactacagtcctgtctctcctgccaccccatagaccggaaattgatgagagattgaaagggggatgttgcagctacaagatccatataccattatattatctacaatataggtgtttttaagtttttccaatgagatgtgtaaagatgtacttgatcataaaaatatataattccactggatttgtctcccaaaatatgctatttattcgttgaacgacttagtacagactagggcatataaagtgtgaaatgtacactatttttgtctctcccaccaattttttcttctcttatcttctctatgtcatcacactcattacaaccactctcttgttccaaccgaaatgcaggcctgttctccaccaaattaacttgcaactgtcatctgaaaaaaaaccaacgcaacaattgtattactcagatcacaagagctagcatatgcatccaacacaacaatgaacaatcctacttcctccgttttatattataagactttctagtattgtccacattcatatatatgctaataatttagacatatatgtgtgtctagattcattaacatctatatgaatatggacaatgctagaaagtcttataacctgaaacggtccgtaggtagtattagtgtattaccacagctaatgaccagcttctagtataaagtttattactgcaagcggtgaattaatataaccgcgtcagctatagtttcatcgatcattcactcactcactcactcactcactcattcattccaagtacgtctccatcacttcgtcggcgtcaggccaacgttgctcatggtggcgcactccatggagcagatgcagcgtcgagtcaagtacttgcacttgccgtccatgtagccctccagcatgcactcgttgtcgcagttctgcgaccgcaagcacaaccccttgaaatggctgctcggcttctcgcacaacctcgcctgcaccaccaccaccatccccgtcatctctgcacaaaattacagaagagattttttttactattattttctttagagaagagtattttttacccggcctatacatccaacccgatgtatgcaacctttttaaattaggaacttagctcatcaaacaacccaatccgaaattcgctcctatggagatttgaactcaagactttagggtgctactcaggtcaatataaccagtaggctacatgcccaactaaaaaatacttaaaaaaagaccggatttgtttatctttctgatcgtaaatataccggtggcgacgacgaggaggaggacgaggacgacggcggaagaggagagcttgcctgaaggctccattgatgatggagatttgttattgtgtgttcagtttggaggggaatttttggacggtcagataaagggaaattggagggtgtggccttcttgtttatgtaggcgttctgatgctgtgaataactgcatatctaaatcagagggagggcaatattaattgaagttcccatgcagggagtaataatatatgcatatagccagtaatgcatttgttaggggaaaggattaattgaaacatatccgtccttaaacattatcacaatctattgtaatgcatttattgtttggggattaatggaaaaaaatccattttactcctttgaaatatttcctcggagcacttatcccctaagtgatttctcggctcattttactctcttaactattgaaaacgactcaccttactccataactgtatttctcttttagtttctattttacactaaaatttgataagatcatagatgcattataaattacctcttcataatttttagatttttttatcactgtttacatgggttgaaagcactatgactgatttaaacatcgagattttaaactttaagcaaatagtcatgaaaaaattcaaaaatattttgtaactttgatgatgctgtcaactatgtcttaataaaactttaagcttaaaatacaacttgtatgaggggaaacaaagaatggaaatgttcacaatgtttctgtgcagctggtctctggctctctccgctgacttgcacttctctattgcttttctggttatgactgaataatatgactcgttccattcctttcaattgctgaataatctcatgtagaacatcatctcccaaagtcaaaatcgtatcaagattggcgcacaaacatgtgtgtgtgtgtgtgtatctctatatatataggagatgctaaatcaacatcgcgattgagccgcactctctgtgcagtcttctccatgattgcaaattgcagcagaaaaccagcttacttacagcaatgagaggtgctcatcatcttcaggcaattctgatcctctccatcttgttgctgccaatgtttctcttcggatctgtctcagctaattcaggtatttaattagcgtcgaccctgaactgaatctatgtaatctacacaacttataattaaataagctctgtttagcttgatggtaatgttgccggtatatgtaataattggctatagcttcttttgagtaaagaccagattgaatatatttttcgttatcttaaataaaatgttgccgttatatatgtgtgtcagtgattgatagcaagccggatggggcagtgatcattagcttggagaagcgaggaggccgtcggttagttcttggaagatcagcatcaagatctctttcggcaaactacggttagttgttgcaacgaggaattaattaatttcattaaatctgttttttggctgatcaattcatcatttaatttcagtaatttgatgaattacgacttgcacacagggctcatctttgaatgtgattgatattttcagatcctaggcacgatcctcccgtcactccctgactctgcaagaagatttggcgccaaaacatgaaatggatgaaggattaatcttagatagggactcgtttttgttttgttctattgaagatgtgaggattcttttctcttttttttcctttgcaaaattttaactgatctgatgtgcttcggctatatttgtactctcgctggctggaaatagacaaccaatacgattaatcacgttaattgtaacgctgaacaaactgcttaaggatccgaatcacatttttactctacttgactgtttttggtaacaataccgatactatgaatcacatttttattctagctacttaattaggatcccattgaaatggagaattgacagaggaattttggaggattcatttttctttgaattttttatatagagccctttgattcatggaagagtataggaaaattgccataggcattcctatgatcaattccataggaaataagtaagatgtagactttttgtgaaactttcgtttggttaaatttttcatgtggtgcaatcaaaacgacctcttcctattttctatgttctcatttcttataagattgaaaaaacatacaattttaattcctatatttttcctattctatatttcaaagagggctttactattttcaacgctatacctatgtatagcatgcactcataactactacaatttgttagttagtttcattgccagtattatcattagtagaaagtgatataagtcagtgagtaaatttctagtattgctgaaaatctgtcgacatattttctcatgattttctcgtgagtgataggcatgcaattgtttgctcattcgcaattttgtcatttgttcaataggctattcctgctctttgggtgggtgtgatataaaaactgccctatggagggcaggaatggcccacatacaaaattctaccatcacaatttcccatgccatacgccacgtcatttgaactacactccaggagtacagtttataaaaaaaaaaaactctcccaaaaggcttgagaagcatatttttgtaaattttgtataaggaaaatatatttatgtaaattttaaaataataaaaataaaaaattgagatacaagcatgcatgatttttttatagtgtaactacatagtataattattaagctggagttttcagatgacctgacttattcgtttgaagtcattattgtgtcttccattttttcaatcaaaatatattaattcatatatagtcccaggctccagctttcatatacacataacgatttgaagttcgtgttacagctgactacaaatcaattttcttctcttttgttctcttatcatctccacgtatgtttatgttcatagctaacttgtagtctgctattgtacttttactctaacgggatccaatagatatgagtatattagatctgaagtctttgtaatgttaaccacatgatagaaagattagagtgactttataaaatctggcgcatatcttatatatatactctcccatttttcttacgagatgcacataatttgatttccctttctgttgtgcgagaggaaacaccttattgttcgaaaaaaaaatgctaagattatagtcacatttttttttcttttgctggctgatcaatttaaagcaactggaatgataacaaacacattcaatccatgaattgtaatagctaaaaaaactcgattcgctgcttgtcctccaagggttgtttattatatatacatggccgggcaatgagcacgaaacggcattggaaacagaagatcgaaatggtcttgctgtgactttgacctctgacttggacgtactgcaaaggattgcaacaaaaattttttatgacgtgcacatgagtatatacatgaccgatgactgagtagaatctggattacatagataattaccctccatacaaagccttcacctagtaagatcctgccccagtatagaaataagatagatgtttaactatataagacactaatcgattgatgtcatgcatgatctctccaaataaacatttgacttaggctgtgtttgagggagaggggattgggaagatacgcaaaacgaggtgagctattagcgtataattaattgagtattaactattttaaactttaaaaatggattaatatgattttttaaagcaactttcatatataattttttttgcaaaatacgcaccgtttagtagtttggaaagcgtgcgcgcgaaaaacgaaacaaacaatctcccattgttctccaaacgaacgcagccttactcttccatctgtcgataaaaacgaatgattacattagttatgtcagaagttttaacggaacctgaagaaattagaccaagaatatcccaagttcatatacttatgtatgtattttatttcttgaacgcataggagaaatgcacatcattaaaaaagagtccaaaacggcttgctgaagtaaatacaaagggtttacgaccatctacggtcaaatgctactaagatctttggctcccgtcatacactataacttggtctcatccctaatatttttcatgatgatattgtaattaggtaaattcccttcacagacaacttgtattttagaaaagagggagtacatgtttctttctagtccttgaatggtcattatcgaatcaatcaccaatttcaacaaccaaatttattcacccttgacttagactcaaaactcaaaatcaaaagcgttgaaatttcagtccagcacatatatgactcttcccagttcttgctacttgccttctatttataaacttgacatgcccgtgaatgatgttactacaattattataggcacatatgtttgagcttcctgcaccaataaccaacaagtgaggctagatgggagctgcttggcttggcgtcgggttgcaggcaatcctagtgatgtttctgttaatgtcgccaccatttctgccctgtgcgctcgccgctggctgcagtagcgaaggcaagtccggcgaccaagtggtcggcatagtcagggagatgcaagaaggccatgatttttttgcttcaagcaaatcaacatggtctcgtcgaattcttaatgcgggtaagttgtaatactcccttcagtttttaagttatgatgtcattatatttttatacgtttgagctttcgtcttatttaaaagttttatgtggttattatttattttgttatgacttgatttattttattaaatgggctttcaaaacatgatttatttattatttttttaaaaaaataaataagataaatcgtcaaaatgtatggacaaaagttaacggcgtcatatattaaaatcggatgaagtattaattatcaggattgacaatctcaatccagctgattatttgcgtacaaagttagatttgtcatgaaacggtgagtttgttgagtttattattgtgatgaactagacaacacaatagattaggctgaaacaattttcttccgttataataaaaaacaatgaactatagaagcaatttttattttcttttgtgtgcaaggttttatttgacttggagttcgttgcttaatttcaggtgaagatgggagacacaatcctcccttctccccgggacacaagtagcacaaatggagataaatgccggggctcaattgagaaccccaccatatttgtagaatttcatgcgtggtggtgatggagtcgtggataactattatcaggattaaaaatcttgatatccataaatataatggttcacaatattaatacaacaaatataaaattaactaatccaaaataaaaatattaggtgaacggtagttcaaaatgagattttagtaataaaatccaatccaaaatgcaatttgctcataacagagtgatgtgtattggtcagttcatgtatttgttctgttgttatgtgtacttccctcagaatttcaaatgtcaataatgaaaccagctgctttgcctagtagtattggttccatcctttgcaccacctataagtcctgccaaattttcttcctaatttttctcgctgaaggttaattttttgtgctaaagttttcaaggtttgtcaatcttcattctgatgttatgttgactaaatttattaatgagaatcctagatatctatgcaagaattaatcatgtgcattggtcacttctcttgaaattcaaatgaagaaacggtcttgctgtgacgctgactataagaaggcatatgaaagtgaaacgaaacttgtaaatttctcagtctgaaagctgagtatatctgtgcaatccatgagaaagatgaatttgctgaacatgtgtccttttctctttttgtaaagggcagatacctcctcctattataaagaaagcaaacgcaagatttcgtaaaatttcaagattaatgtcaatttttcagctgaaactgtcttttgctgttgatcatttcaaagacactgactagcagccatgattgacgtaggtgatgattaggaaacaatattctgctatttgtgccgcaaggttgttattgacttacagtcgagcaatggtcagtggagtcttgttgcgactttgaaggcatgattgtaactttttgaaatgacatatagtatgccagtttaacataaaccggtaactggctgtgtttagttcacatcaaaattgaaagtttggttgaaattagaacaatgtgatggaaaagttgaaagtttatgtgtgtaggaaagttttgatgtgatggaaaagttgaaagtttgaagaatttattttggaactaaacctgagtgtacatccgtagcttgattacacggacaggcagttgtgtgtacatcctgacttgttctcagaaaaaaaaaatggagagaggccagtaggccctgcctcagttggaaacttataatctacgtgtgattttactgtacttaaaaatatcgggatatcatattttattaatgtaaaatttagtacatctaacacgagtactagaaaatactaaaattttcactgaaaaaattgatacctctcgatgtcttgtctgtgaaggtcaatgaaaagatcgataggctctgcataatatttttcttcttgttctattctgtttggcacgtacgtacacatcccaattccaccaaactctctgtggatttataaataccctgcaaattaagagcaagtaatttggacatccgagacacacagattgggagccaaaacatctcaaagaatatttccaaagcgatcgaccatgggaggagcttctcggattcgcgtcgagttgcaagcaatcctagtgatgttcctcttgcttccgttgccgtttctgcccagggtgttcgccgccggcagctcaggcggcaactccggcgagctagtggccggcggccgggagactcgtaggaagccaccggcaataaggtctcctcggtttctgtctggtggagttcctgcgagtaagttcagtcctgatatattgagaggatccagattgtttgtcagcaaaaaaatatatggtttaatttcgagtatttcatgtatgattttttttaaagcgaaatacatggttttatttgactcgggatttattttttcagaccctggaggtgggcacgatcctcctgttagcaatggaaggagaggccgttgatgagagaatcagatccaaagttccaaaccccatattgtcgaaaaccagaatacttttatcttttgacacaactgtaataatacttgaatatagtgaaactcttcactgaggagcatactcctatcattttctttcgcatgcacgacttaatctgatttggaattacgttttaggaggaccagatgggggacactaccctccttgttgctaggaatttgagcagagctaggaacaaagtctctctatcggccaaggaagtaggtgtgggttggtagagtcttaggacataaactctatccattaaggtttatttttaaaaaagaataatgggatataaatcccagcctttgcatcagatttaaatctcaggaaccacaattgtgtgcatatggatacttaaatgactttattggggtttataaatttatggttatataaggtttatagatttatagtaggacgtctacttcaaaagtatgtgtcaaatatcatgtactctcacatgtgtataagcgtgatgtgcatgcgcatatatttttcactcgatgaaaataaaggagaccaacccccactccccaagaaaaaaaaagttcacttctgtataaagaacattgtattgtgtatatcatgatatgtttagttgccatacttaagttttcttcgtatttattctgcgaaacatgctggttgtcagtcaaccactagataaaaagcgaaaatcctttgactcgggcgcccgatgagaggggaaaatatcgggtgcccttccgcttccgcatcgcctcgcctcccctcccctacctctctcgcccgtgccgcctcctcttccacgtgctccctcgcctgcgccacctcctctgccggattcgtgcgtgccttaaaatatcataaaacctccattgaaaaaaatcaattctaaaacttttagttgtttgttcctagcgacttaaaatccaattctaaaaatatataaacctacattgaaaatatcataaaaccaactcaaaaattcaattttacaatctaaattttggcaatagctgattctatattagtgcaaacgatcgatgaggctgatagcagtcgtagtagtaaatgcttgacttggttttctgttttccttcattttgcaccttacttcgatatggcgtcttcctgcgttatggagaacaatagtactacccctaatcccaaaataaatgtaattctatgagtccacggcgtgaaattaatatgatatcgacgcttgttgaaagttgaaaccttccaaattaagcaattagtacgtagtgtccaccttctttgtcgcgttaaatttctactccgaatggatcttatgttctctggttcttgcgtacatacacaccaggtatccgtagtcaaatgcctgaatttccaatcaaccaactaatttcaacagctctattaatttatcatattgactcaacaacttttctttggtaatttaaatagtctgaaaggagcaatgctatttggacaagcggtagccaaacacctgtaaacttgtttttgtacaaatcacccccagtttgtctttctgaagaagcgttaattttgaggccatcgagttaattattgtgagccaccatgggagctgctcggctttgcgttgggttgcaggcaatcctagtgatgtccctcttgctgccgccgccgtttctgccatgcgtgctcgccggcgctggccctggaggcgagctcgtcgccggcgaggagaagcatcaaggccgtgtatttgcttcaggcatatcaacacggtctcttcgaattctatctcaaaatccaggtaagttgtactccatctgtcccagattacagcaatctaagacccggtattagtcgctatattctagaacaaaggtagtagtatttcttttcatattataaatcatttcaaaatttttataagttaaactttttatgctttgatcaaatttatagaaaattatagtaatattttcagcacaaaataaagaaactcttaaaatatgttccatgttagatataatgaaactaatttagagctataaatgttgctatattgagtaagagactatacatatgaagggtatgtttgcacccaaatcgatctattgcgataaatgatactcccatcggtcatgattattcaacgttgtgaactttatgctcacaacgtcgaataatcatgatcggagaaagtagcaatttaattggtaaaagaattttagcaatagttagaatagatgatagcccggtctctgtgttttttttcctcaaaataatgggcatatcttgtagcaccatatgttgagttccatttggtttgatgcctagaatctaatttcatttcaggtcccggcggtgaacaccatcctcctatctcttccggacgcggcaacaatggataaaggctagacaatggatctatgagagtacccaagaaccgattagaactaagcaggccgatccaggtgttagaactacgtttaggaataagagtaaaaatacgaattatcaagataaaataaagctctccagatataattctggaggttaggtttactaacttgtaatacaagtttccatactctattggcgtgttcggctgtctttatttgcaccgtgccaccgtgttgcagtacagtacttttatgtgtgcaaagcacaaccgaacatgtcctatatatatatttagaaatggatggggtatatcctatgagatagttattatactttttttagataatggaatagaatatcccagcctttgctcaacgagctacagccaattattacagagtaacacacaaaataaaaagtttctcacataaaaaaagaagacacctaccaacccaagataaggagtacacaattattgaattctgtttgtgaatctccatccaaaattggtaaacatttgcataaccgttgtctcaaaattacgacatacaacttttaaacgctcgccctcttcatcacacttttgtagcagtgcccaagacctgagccagtgcgttgtcctgaaaattacctgcatatataaacagatggtgatttgtcaaaaatcatatcatttctactcaaccatagagtccaacatatagcagaagctcctatgagaataagtttcctatttttcttgtccacccccagaagacaatcataaaaaatatgagatatgctattaggagggtaaagaccaaaagagaactgtacagctctccaaataaactttgcaaaatggcattccataaaaagatgctgaatagtttcattcttcatacagaaacaacatttcaaactcccattccagtttctccttgccaaattatctttagttaacactacccctttaagtaagtaccacataaagatcttaatcttcagaggcaaattaagcttctaaagaatcttatttctctcaatataaccattgttatacaatactaaataaaattcaacagattatttgtgtttctcatatatccccacattgatgctgcagagtatattgcgtacctagctagtcccttcaattggggggggggggggggggtagctcccttttgttttgtctaaatgaaataatagcgccgactttacgctccatttatttcaagagaaattttagggtcaacggtcgttgagagatacgattcaaattgggcctatatttaaaggatctgaagtgaacattttctatggattgaagtgaacattttccatggattaaataagacagggcccaaatcggccctaaaagccgaaaaccctcaacggtcatattacgacggacacgaatcctttcctttacaagcattctctcaacctttatctattataaaaggcaaattttgctacatgacatcgtgacttcgcgattttagctataagacaccgcataaagtgactttgggggaaaacactctataaacgtgataatttgtcagcggacaccgcactcattaaaataataatttttggttgaggagaagagaaaaatcgtatgaaatgtcacaaatacccctggacccacatgtcagctctcacatctctcttctctctctatcccttctgtggagaggagaatgaaagttacttcgtgtgttgtcttacagctaataccacgaagtcacgatgttctgtagcaaaatttgccattataaaaatatttcgtggaggtcgcagccgctgaagggaagcaatgcgggtgggcgggagagggagttgttccgccacttcttctagtggccaaggacagagaaggagcgcgataccagggagctcgccgtgagggtgagggccgcgaccgtctgcgtcatatgctgtaacaaagaggacgaaggcgagcgggagcacggaggcgctgcggccgaagacggcgacttgagggggttggttgagcacgaaactcctcctcgtgcccctcctccacctcccgctgcgacgtggccgacgggtcaagctcgacagaaggggtcaggcacctcgaggaagaatgcgaggtggtcatatatagagaagggttgacatatgggtccaggggtatttctgatatttcacgtgatttttctcttctcttcaatcagaaattattattttaatgagtgcgatgtccgctgataaattaccacgtttatagagtgtcttcccccaaaagttacttcgtgtgttatcttacagctaataccacgaagtcacgatgttctgtagcaaaatttgccattataaaaatataagttgtttttgccaaagctcggtatgttgtcgaattaccacatggataccgaatcccacatgcccgcatctatctcaattctcgcgtaaagcaacatgtcatccgcgtccacacatgggtgttcctgcttaatacgttaaagatgctcgtggcacaagcggtacgtatgtgcacgtcgcgtttcctgtacttaattttttcagttttcttagtttctttgtcccatctggtgatctggtcccttcttgtctcaaccaaatacgtgcgtacatctttcaatctatatcgtggaaaatcatttttgctagtgactaaaatagttttttgctggcggccgacggtgccgcgagcgaactaaagccagtgaaaataatgcattttcactggcgattagccgaccgccatggaaaattgagtttaacaggcgagatgttaagacaaccgctagcaaaaataccatcttcgtttgcggcaagttaagaggaccgccagtgaaaacattttttggggtaaagaaaaattgaaaattggtgccgctggtcgccacggccgcatgccccatccatcgacgaaccccgccacgatggctctcttgccaccgccgagccctagccactgctggtcaccgccatgaccggtcgccgccgccgaccccggagaggggaggttcccctgtgccacccactatggatctggagagaagaggagctaggctcccctgcggcacctcactctgccgagcctggctgctgccaccagatcatcaatcgcccgcagcctcttgcacgagtcgccactgccaccccatcccctttgccgccaccaatcgtcaccgccgagtccggagagacaagactcccctgcgtcaccctactctggatatggagatgggaggagctaggctcccctacgccaccccactctgtcgagcccgcacaccaccaccagatttgtcgcccgtgcgcaggagttgccgccaccggtcaccgccaccacccctcccctttgtcgtcgccggagccgccgccattggacccgccgccggtgggaagggaggagaggagtgaggcggtggtgcgttagtgagggaggagaagaggagaggtgtcgatctgaggagaggagaatgaggagtggatctgaggatatttgctatgcgtggttttttaatgcaccacggccgattttaaaggcggtgctctttagtgaccgccagcgctggcagtcgcttaagagatccgcttgtaaaaatatcttaagtggccgccagcgaaagttggtgaccgcaatccgtcttaagtatatttacaagcgcgcatttattaaatccgccagtacgaataaaagggtgttgctacgaaagatggtttctattgtagcgacggtaacaaaatacgtatgaaacttgattgaatactcgatcaatccacgacaaaatatatcaggataacacactgacacagcaatagccggttcttttttcatttagatgcaaatttcaccttggtttctattagcacacttttcaaactactaaatgggcaatggcatgtttcgtgtgaaaactttctatatagaagttggtataaaatatcaaataaattcatttttcaaatttgcaataattaaaacttaattaatcatatgctaatagcttcttgtttttcatgcccttacttaatattcattttcattagtatcaaacaccagtcgagtccctcgcaaaccgcagccctgctcaatcagttccccgcatatccgcttacatcacccacgtcgagtggcctaggagatccgtgcggtgcacctcgctgatgatggcgctactagcacgactgccatgggcctgcgatagcggtggtgtgtgagacagataaccaagtgaaagactgcaatatgcagttgcggtggcggacaagttctacttggccgaagctgtctcgacataagttgtcgtacactcttgtcactcgcactcatgcacaattttagcttcaatttatctatttctttatggtgaaatcccgtggatctatctaatgattttatttgaatggatttagggtccaatttgctgacaaattaaagttctttcaccttcgtgctcaagttgagaatttcggaatggtccggttgcagactctgtcggactgtactacccggtccctctacacacatcgcacatatatgaccgacaaaggaccttcagaggaacaactgagaaaaacatcctagatttcttaagtagctaaatatttagtttctaatgaatccgttgcaacgggcatattttctagtcctattaaaaaaaaccttttcctctctctcactctcctcttaaagcaacggtcatattttctttctagtcctcataaaaaaaagaaagaaaaaacctttttcatctctctcactctcctcttaaagcaacggtcatattttctcccgtaaaaaaaaacggtcatattttctcccgtcaaaaaaaagaaagaaaaaaccttttcctctctatcactatcctctcaaagcaacggtaatattttctcccgtcaaaaaaaaaacggtcatattttctcccgtcaaaaaaaaaaagaaagaaaaaaccttttcctctctctcactctcctctcctcctcacgccgcgaatcctagcgaggcggaggcggccaccacctggccctgcgccggcgccgcggcggcggcggcggtggcggcggcggagtcgtcccctcctctctccctcttcccgcggtgggattcctgcaaatctatgtgcatttgatcagcaatggtggttctagcagctaggtgaggatctattcctaaatcctaaccctcccaccatgttcgtgaaagggtttttgggaaatgagcgtttaggatggtcgaattggagtactcgatttggctctggtagaaaaccctagaaagtttgcttccaaatttgctcttatttttcttgtgtgtgtgcgtgtgcgcatgtggcagaggaaatttaggaggttggatgtacccagatttggtattttctggtgctttacctacatcggttccaaagttgtaatcccaattttgaggccttcaggtgttgtggtatgctaggagcttaataaggtatctccatgtaacaggaatcatctatatgtggaatcatttgcatactgctctaacttttatgcgtcgatttaggttctttggagtagatttgaatatttgatagagtaatgtttctcttcttaaaattgtgggttcttcattgacttgattctctgccatgttagctactatttttaagtggatcagtgtgctggcctcatttgatgctctcaaagtgaatgaataatacaccatatagtactaaagtcatgggcattggattggttgaagaaaataggattgtttctatgtcagagtacaaggtttcatcaattgtggtgctgtagtaatatcgagtagaaggggcttcgatagccatcatcagtcatgtgcttccaaaatggatatttcataatcttgaattctaaattgaaaattggaagtaccttatcgaaatgttaattggtcatgccatcatagttccacaatgtttcttattatccttcttgtgcctgtgatgagactttgttctgttcattaatgccggtggctgtgcaattgagggttgtgaaccctcttcaaagctttctgacgaatctttcttcgaaggaggggatgcaatattgacatctgaggatataatttgaagtggtgactatcccttgctttaccactcagttcgatatggaaattccagctagaaaatcgatggtcttgctcctggagactatttctatcatctgcatttgctgagatagtgaacacttacgggccaaaaggaattagggcatttgatgtccttgtgcaagaagaaaatgcaaacacagtattcatgagactcttaattttgtatcacaatttactttcaggtttagctaaacaatttgacttttgattgatgcacagattttgtctgaatttgatgtgtatgcagtggtgggaggtaacagaccccttcatatgcatgatattagggtgacagttgagagtaatggcacctttgtcataaacttcaaaggagtaagggaaagtcccatggtttgtgccatttgtattcgaaaacggtagcaatagcaggtaagacacaatatattagattcaacttactccttcaaggtctaattttcagataagatgtttctgtatgctcaccactgttttacgttcctgacagaacaagtccttgatagacaagctgatcaactgagaagtgtttcccaaaagtatgaaaatgccaataaattatgggcagctgccatatctaacttggaaaataaaatcaaggtaaaagcagatttactgaattgataaatacattaggtgctatgttttactgattatatcactttttaattttcaggtcatgaaacaagagcaaacattgctatctcttgaagcacatggccatgcaaacgctgttcctgaactgagtaagatggtaggggctgttcaagcattaggtaatatccatcagttgcattattgtaaaggttttagagtatttgatgaaaaagtttgtaaacattttgtttttttttgctgcagttgtgcagtgtgaagatcttaaactgaagtactatgaagagatgcccaagagaaagaaacttcataatattgtcgaggagaccaaaggtgcctcttctgatattctctgtattatgatgctttcacttagtaccatgaatgttggtcgtcgtgtactgccgacagtttccacgtgcttgcattgtgctaatagatattttcagtgatgaactcaaaaaataccaagagtccaatacatatgaattatgtaactatttaccggtatagtagttaacatggcgtactttagctagaatttactaatttacccagggtcccaaaggatccctggaaacataacataggcacgccgcttgatacttctacgcttaactccgtagtttttttcatattgcagtgtggttttgttttatagttttgctcgggcttaattgaaacataattagtcagcttgctcaactccatgtccctaggtgcaggactgcagggagctgttgtactgtccaactccatgaatatgggctgctcgcatggtcttcctgtgctggcgagggcatcggctggtactgcaggcttggccgctgcaaggggtgccggcgccgttggcagggcccagctgtccctgctcccaagggacgaccatgactgttgcagccatagtggtgcccacgatttgcaaggcagtgaatgtgaattaacgacatggtcagccacaaagcaggtctgcttggggattgccagattagcaagatcagtttcattggtaacttcttgcagcccctcctctacatcgtcttgttttccaatccattcaagtgtcttggcatattgttttactgtgttgttttttatgagctctgctactgttgtatgaaactagactactagagtcactgagtcagcaaccaagcagcacatcatcttagctttttgaggaactcgagtctgtctagattgtaaaaatcaaatattttggtaattgatctgtactaggttaaaggttaactattttttcatgtcgaaggtttttcatttcaagcgcacatatagttcttaatgtcctgcaataattctgaccattatccatataccagtgctggctattattttgatgatgtcgtatatgtgctctgctattcataatttgaaatacaaattaagttattgcagggtttgcactttttatcttggtgcgaattttggtaggaccaaaatttatgaaattttttgattttcagaactttttggattgattttttttagaatttgaataaactttgagaaatttcaacaaagaattgagaaaatctgccgaaaatttcgaaccgagcattcagaaatttctgaaattttgaaccgaaattgcaatcactgggttattgtcataatgtgataccacattcttaattgcacatggtacgaaggaaagggagcggactttatatcactgttgattcataatatttctatccatgtatatattattgccaagtttactgtgaaatagaatccatattctacttcagagtaaagaggggtatttcctgttcaaattagtcattccaaaattgttggtgttctattttatgctaacttgttttttatgttcataattaattaattccataaataaatctttgataaataattttttatgttctatttgatgctagccaaattaatttacacagttaaattttggctgcattaataaatcttttacttgtcaccggcatcattggcaaattgatggatgattacattataatatagattatttacagtagtggatagttgatctcgttatcgcacctagagaatttgtttgatataatgaattgaacaaggatgtgaactacagttggtatacctgaccacatgcttgtaacaacatgtataatatttaggattctcagtaaatacctgaccacaacctgtacagactatatttttcaacttgtggctgcctcgctgatctgttccacctggagaaatgcttgtaacaacatgtttaatatttaggattctcagtaaatacatgaccacaacctgtactgactataattttcaacttgtggccgcctcgccgatctgttccacccggccccaaaggtggaggtctgtcacctggtgcacttcgtcatcggatcttcctcaactccgtcatgtgcagatccagcgcacggtgcgccaccattgtgaatgtcaaaccggttcaccttgcgatcgtccaccggcttcctcgacgtcgtccttgaaagcgaccctgtgcaggtttgctgaacgcactcccggcgtcctctccctcttgtgccattatgtgcaatttttgtgctgcatttcgtgctgaatccgtgcaaagaaaaaggcttaatagttatcattctgttcccttttttgaatggttttcagtttttcacatggattatgctctgctctgtttcgtttatgaaagatgcttatctcaatttacactaatctcttttacttggtgtatgcatatatttattctagcctgctagatgtatattgctagcgttcagaaagtatccacgaatgctattattcatctaaatataattgttcatatatttttaggagctactggtttatctcatgaaaatggtccgaataacacttgacgtgtaaaaagatcagaatgtgttatatattatccttttttcatttcaccaaagtgttttatttggactacccacaaagagttattttttatttcacatttctactatatatatcataaagtttctcttttcttttctgtgccttctaggcaaacatcgattcgctgaaaacttcagcaaaggagcacttgaagaataagtgatcgccgtcttcgtcttgatgcaagcaggttccgtatgcacaatgttcttcatgagcaaatttgtcattgttggtagtcaattttttaagataagccaggcaaaagttgttgcactcagaggggggctgaattcttctacacaaattcccagattggacaaggggcagaagcagaggtattgatctgatcatatatagaggcagagccttccatgtgagagcttgagtgcaaccagcaggcggactgtactgtcgtctatcttcttcgtcatcgaggtgcactgcattggtgacatcaggtcatgggaggtgagaaacaagttttggcgtgcgacattacgttggtcataggaaataaaacacaatatgagaagatcatacaacggcctgcttttccagtttgcagaaactgtgatggttttaggatttcttgttcttttgtgaagtttaggggttgaggagagtattttgagattggacttcgtttaatgatttttttcctttcacctttgtctgttcctttatttaactttatttctttgcagtggcgagatgagactgtgtactagagatgcctactttgtagatatcttgagacagtgcaggtacatccaaatgctcacttcactaattcaatatatgtaaattatgtaaattactggcttatttattttcagtttgattgctgtgcatgtatatcctatagaaatccatttctttatattctattttaaggaacagtacactttttatagatactctctccatcccaaaatattaacaatttttagcacttaacatttgtcccaaaatataacaacttctccatcaacattctctttctaaccaataacaaccccttcctatttaattctacctactttcacttttcccacctaccttcacttctcaagcaatcacaaccccttcctatttattggtttcttcggtggtgtttcatttctcatccatgcattttgttgcacatctaagcctttatgacaatcacggtttccttgtatcaaacatttctagttttctcccttgaaatgtgttgtgttgagtgtgcgtgcgcgtgtgatgatgatattctgccttgttgccaaggaaggcagcaagggtatgcttatgatggtactatgatgctctttattatgatataattacaaaacttgttttgttaattgaatcatcaactcctttacgctaaaatttcactacataccttgcatatagtatattagaattgcttttggtttggcagtacattatttctaatgatgtactgactcttgttatactagaatatcgatttttgctggttgtatgcttagtatttcttgagtgatgcatggtttgggtagcctagtatttcttgtatagttgggtctgactgtttattgaaaccaaataactttactatgagctggacccatgcattttgttgcaccttgaagtttttatgaaaatcgcggtttccttgtatcaaactttattctcccttgacgcttcattttccatcctttcgtttaaacttgatgctttcagttggatttctttgtttgcgaatgttctcgtgtattcatgcttctgacatgctatttggactttaaaattttactttggattctcgcgcaacggttcctttttcattcgtgagattcaacttggtattttcagtttgatttcttcggttacaaagtctctttttcgatcttctctttggctctaaagctttaatttagtaccgagacgtcaatttcctaaattttgtgtgaacttatgctttcttgtttgtgaaagaaaatatttgcttgcatttaaaccttgtgtctttattgtgctatgatgttttatttttggatttataactgaaaagatatcttggttgcggcctagacgttacatttggttgcatcttattgattttattaaaatcgttgtttggttgtaccaaacgattttgtggtttctctactgaggcttcatttttaatccaaaactttttttgagctggacccttgcattttgttgcacatctatgtcttaatgaaaatcacagtttccttgtatcaaacatttcttgttttctctcgatgcttcattttccatcatttcgtttaaaccatatgcttttcgtaggatttctttatttcgaaagttctattatattaatgcttttgacatgctatttggactttcaaactttaattttgaatttataattgagttgtagagttgggtcaccctctttattgaaaacaaataactttgttgtgagctggactgatgcattctttttgcaccttgaagcttttatgaaaatacttcctccgtttcacaatgtaagtcattctagcattttccacattcatgttgatgttaatgaatttagacatatatacatcaatatgaatgtggaaaatgctagaatgacttacattgtgaaacggagggagtagcagtttccatgtgacaaacgtttctaggtttttcccttgatgcttctctttccgtccttttgtttaaactatatggtttcaactggatttctttattttcgaatgttctcttgtattcatgcttttcacatgctatttggaccttaaaacttttatttggtttctcgcatgacggttttttttttcctgagattcaatttgttactttcaattttattttttcggttacaaagtatatctttttcgatcttctctttggaatctaaatctttaattaagttacgaaatgacaatttccttaattttgtttgaatgtatgctaactagtttgtgaaaaggaaatatttgcttgtttttaatccttgtgcctttttgtgcttttgacgtttttatcgtagacttatatctagtttctagagttgcgtttccctgtttatcgaaaaaaatatatttgttgcaggctagacgtctagatttggttgaatcttatttatttcttgaaaatcgtagtttgcttgtcccgaacgatttattggtttctctgttggcgcttcatttttcatccataagtttatgttttgtacttttagttggattcctttattttcaaacgttcttcttgcatcgattcttgaaatatcctttttggagtttccaaatttttcagttatcaccgttcgtcttccttaagttggtttgaactttaatatctggtttataaaaactttactttggtttctcgcgtgacggttgtctttttatcattgagtttcaacttggtacttttagttggatttcttcaattataaagtttatctttttcgaacttctctttggacttcaaaactttattttagttctgaaatctccattaccaaaattttgtataaacttttgcttactagtctgtggaaagaaaatagttgtttgcatttaaaccttacggcttttttgtgctttgacatttagacttataacaaagttgtagagttacgtctccctatttatccaaaaaatacgttacgtctccctatttatgaaaattgccgtttacatttggttgcatcttatagtcttttgcttcagtttgcgccttgggattggataggacagcatctggcagactagcacatagacctatttagctcttccattaaaatttcttgataaacaccattgctaaattttattttattttaagggggatagaataccatgaccttagaaacccacaagcctaaatggaaatatcatactaggaacaagtcataagcaaactatgtaagttaagttgagacggctcagtgtgcaaattttgtgcccctttacggtcggatgcaagatttgtacattgcagcaactcacaaacatggtttgggaacttgacttgtaggttttgaaaacatctcgaagatgatccatttgttttaaaattatcatctttttccacgataaggagaagtttgttacgagtctgagttaaaaaaatatttaattgtgtcaccttatcctagcctatagcctataaagagttgcaacccttcccatgcccatgaaaaaccttgagtaggatgaatagtctcgagaacaattttcctaaaaggattgttctatggcatgtatgcaatacaagatatcttcataagcactgtatcatttcatacatgcatcgcatcatttcgttcatcgtgataccatagcatacatccttgcctttttgagaaaaagaaaattcctatcttgctccatatgaccgagaacttttgaaagcatgtacttctgtgaatatgagtttgaaaacacttattaatcattacatatcaataccaaagtgttttgatacattttgaaatccatttgcatactacacgtatatattggtttggattttcattttgaaatccattataattgagttgtacagttgggtctccctctttattgaaaatagataactttgttgtgtgctgatttgatgcattagcttgaagcttttatgaaaattgccgtttacatttggttgcatcttagtgatttcttgaaaatcgtagtttgtttgtcccgaacgatttattggtttctctgtggacgcttcatttttcatccataggtttatgttttgtacttttagttggattcctttattttcgaacattcttcttgcatcgattcttcaaatatcctttttggagtttccaaatttttcggttatcaccgttcgtcttccttaagttggtttgaactttgatatctggtttataaaaactttactttggtttctcgcgtgacggttgtctttttatcattgagtttcaacttggtacttttagttggatttcttcaattataaagtttatctttttcgaacttctctttggacttcaaaactttattttagttctgaaatctccattaccaaaattttgtataaacttttgcttactagtttgtgaaaagaaaatagttgcttgcttttaaaccttgcgcctttttttgtgctctgacatttagacttataataaacttctagagttacgtttccctgtttatcgaaaaaatatcttggttacgggcgagttgtctacatttggttgcatccttttgattttatttaaatcgtagtttgcttgtaccgaacgatttattggaatctccgctgacgctttacttttcatccataagtttaaattttgtacttttagttgaatttcttgattttgtaatgttcttcttgcatcggttcttcaaatatcctttttggagtttccaatttttttggttgccgtggttcgtcttcctaaagtttgtttgaacttttcttttcctgtttaataaaacaaaatatttattttgccttgaggcctaaccgttttattttgctctgacgttaattttgaagttataattgagttgtatagttgggtttccctctctattgaaaacagataactttgttgtgtgctgggtagatgcattttttttcagcttgaagcttttatgaaaatcgccgttcagatttggttgcattttattgatttgttgaaaatcatagttcccttgtaccgaacgattttttggtttctccattgacgtttcatttttcatccataggtttatgttttgtacgtttagttggattcttttattttcaaacgttcttcttgcatcgattcttctaatatcctttttggagtttccaaaattttcggttatcaccattcatcttccttaagttggtttgaactttgatatctagtttataaaaactttactttggtttctcgcgtgacgttgttttttcatcattgagtttcaacttggtacttttagttggatttcttcaattataaagtttatctttttcgaacttctctttggacttgaaatctttattttagttctgaaatctccatttcctaaattttgtataaacttttgcttactagtttatgaaaagaaaatagttgcttgcatttaaaccttgcggcttttctgtgctctgacatttagacttataacaaagttctagagttacatttctctttttatcgaaaaaatatcttggttgcgggcaagttgtgtacaacatttggttgcatccttttgattttatgaaaaccgtagtttgcttgtaccgaacgatttattggattatccgttgacggttaatttttcatccataagtttaaattttgtatttttggttggatttattgattttgtaacgttcttattacatcggttcttcaaatatccttttttggagtttccaatttttttttggttgtcacggtttgtcttcctaaagtttgtttgaactttgttttttggtttaataaaacaaaatattcattttgcattgtggcctaaccgtttaattttgctctgacgttaattttgaagttataattgagttgtattgttgggtttccctctttattgaaaccagataactttgttgtcagctggattgatgcattttttttgcaccttgaagcttttatgaaaatcgcagtttccatgtgacaaacgtttctaggtatttcccttgacgcttctctttccgtccttttgtttaaactttatggtttcagctggatttctttattttggaatgttactatttattcatgcttttgacatgctatttggacttaatttattttggtttctcgagtggcggttgttttttcacccttgaatttcaacttggtaccatctttttggaacttctctttcgagtttaaaactttattttagttctgaaatctcaatttcctaaattttatatgtacttatgctttctagttcgggaaaagattgcttgcatttaaaccttgcggcttttttgtgctctggtgttttatcgtagacttgtaactaagttctagagttacgtttccctgtttatcgaaaaaatatcttggttgcgggctaaacgattacatttggttgcatacttttggttttatgaaaaccgtagtttgcttgtaccgaacgatttattggattctccgttgacgctctatttttcatccataaatttaaattttgtacttttagttggaatccttgattttgtaacgtttttcttgcatcgattcttcaaatatcctttttagggttaccaattctttttgttgtcacggttcagcttccttatgtttgtttgaactttgttttttggtttataaaaacaaaatattcttttgcattgaagcctgaccgttttattttgctctaacgctgattttgaacttattaattgagttgttgatgttcgtcttccggtttattgaaaaaaaataactttgttgtaaagtggacccatgcattttgttgctccttgaagctttttcgaaaattgcgatttccttgtattgatcgttttcacgtttcaatgttccgtcttttcattcgaactgaacgcttttagttggatttctttattttcgaactttctcttgtattaatgcttttgatgttctcttaggacattaaatctttaatttagttttgaaatatcagatttcctaagttttgtttgaacttacaagtttgtgaaaagaaaatatttgcttgtatttaaatcttgggcttttttgtgctctaccagtttcatttttgacttataacaaagttgtagagttacgtctccctgtttatccaaaaaatatgttggttgcgggctagaggtctacatttggttgcatccttttgattttaagaaaaccgtagtttgcttgttccgaaagatttattggcttcttccataagtttaattttgtacttttagttggattccttgattttgtagcgttcttcttgcatagattctacacatcctttttggagtttccaatttttttcggttgtcacgcttcgtcttccttaggtttttttgaactttgttttctggtttataaaagcaaaatgttcttttgcattaaggcctaactgatttattttgctcttataattgagttgtagagttcggtctcaattagtgtgcataaccgtgttctgaaatctatagacagcggcgttcatcttcttatgtagtccaaactgtaaaagacatacccagtagactccatgaatttaggctaaattttttaacagtagcttgcagacatacccagtagatcccatgaatttaggctaaattttttgacttcgcatcatggtctaaaaattcataaaacactgcatagtcccaacctgaaaacaataggtaacctcgttgtcgaatttgtgtagcccaatctagaagggatagaatcttggttcctttagggtagctcaaaaccgtaccgatcaatctctctgattttattatctaattttttttgaacctttagaacttgacctaaaaattcggtaaacatagtagacctgtaaattccagaattgcatcacttatcttgaccactttctttaaaataatctaattatccaaaaaatcaccattccttcccagattggaaaaaatctttgttaggatcatgaatataatttttttctaatttatcacccatctaacatagtcttttcgtgcctcaggactggataggacaggatctggcacatagacctatttagctcttccattaaaatttctagataaactcccatttaaaaattttattgtttttaaacccagagacaaaacatgtaacctttgcaagccccacaagcctaaatggaaatatcatactaggagtaagtcataagcaaactatgtaatttaagttgagatggctcagtgtgcaaattttgtgcccctttacggtcggatgcaagatttgtacattgcagcaactcacaaacatggtttgggaacttgacttgtaggttttgaaaacttctcgaagatgatccatttgttttaaaattaccatctttttccaagataaggagaagtttgttacgagtctgagttaaattttttttttaattgtgtcaccttatcctagcctatagcctataaagagttgcaacccttcccatgcccatgaagaatcttaagtaggatcaatagtctcaagaataattttcccgaaaggattgttctatggcgcatgtatgtaatacaaaatatcttcataagcattgtatcatttcatgcatgcatcacatcatttcgttcatcatgatatcatggcatacatccttgccttttcaagaacgattttttggtttctccattgacgcttcatttttcatccataagtttatgttttgtacttttagttggattcctttattttcaaacgttattgttgcatcggttcttcaaatatccttttcggagtttccaaaattttcggttatcaccattcgtcttccttaagttggtttgaactttgatatctggtttataaaaactttactttggtttctcgcgtgacggttgttttttcatcattgagtgtcaacttggtattttcagttggatttcttcaattataaagtttctctttttgaaacctctctttggacttcaaagctttattttatttctgaaatctccatttcctaaatttttgtataaacctttgcttactagtttgtgaaaagaaaatagttacatgcatttaaaccttgcggcttttttgtgctctggcatttagacttgtaacaatgttctagagttacgtttccctgtttatcgaaaaatgtcttggttgttggctagttgtctacatttggttgcattctattgattttatgttgattgttgtttggttattccaaacgatttattggtttcttcgtcgacgcttcatttttcatccataagtttaaattttgtacttttagttggatttctttattttgtaacattcttcttgcatcgatttttcaaaaattctttttggagtttcctttttttttttggttgtagcggttcgtcttcctaaagtttgttggaacctttttttcaatttgcattgaggcgtaacagttttattttgctccgatgataatttcttgaaaatcgtagttgttttgtcccgaacgatttattggtttctccgttgacacgtcatttttcatctagaagcttatattttgtacttttagttggtttccttgattctcaaacgttctttttgcattgattcttcaaatatcatttttcgagtttccaattttttcatcgtcttccttaattttgtttgaacttttgattcctggtttatgaaaacaaaatattcttttgcattaaagccgaccatttcattttgttctgacattaattttgagcttataattgagttgtatagttgggtctccctgtttattgaaaccaaatgactttattgtgagttggacccatccattttgttgcaccttgaagtttttatgaaaatcgcggtttccttgtatcaaactttattctcccttgacgcttcattttcaatcctttcgtttgaacttgatgctttcagttggatttctttgttggcgaatgttctcgtgtattcatgcttttgacattctatttggactttaaaactttactttggattctcaagcgacggttcctttttcattcttgagattcaacttggtactttcagtctgatttcttcggttacaaactttctctttttcgatcttctcttttgctttaaatctttaatttagtactgagatgtcaatttcctaaattttgtgtgaacttatactttcttgtttgtgaaagaaaatatttgcttgcatttaaaccttgtgtctttattgtgctctgacgctttaattttggatttataactgaaaaaatatcttggttgcgggctagacgttacatttggttgcatcttattggttgtgggctagatcggtaaattccagcactgcatcacttatcttgaccaattctttaaaataatctatttgtccaaaaaatcaccattcctttccagattggaaaaaaaaaactttgttaggatgatgaatatattttttttctaatttataacccatctaacatagtcttttgctttagtttgcgccttgggactggataggacagcatctggcagactagcacatagacctatttagctcttccattaaaatttcttgataaacacctttgctaaattttattttattttaagggggatagaataccatgaccttagaaacctagagacaacatgtaacctttgcaagccccacaagcctaaatggaaatatcatactaggaacaagtcataagcaaactatgtaagttaagttgagacggctcagtgtgcaaattttgtgcccctttacggtcggatgcaagatttgtacatcgcagcaactcacaaacatggtttgggaacttgacttgtaggttttggaaacttctcgaagatgatccatttgttttaaaattaccatttttttccaagataaggagaagtttgttacgagtctgagttaaaaaaaatgtttaattgtgtctagcacatagacctatttagctcttccattaaaatttcttgataaacacctttgctaagttttattttattttaagggtgatagaataccatgaccttagaaacccagagacaacatgtaacctttgcaagccctacaagcctaaatggaaatatcatactaggaacaagtcataagcaaactatgtaagttaagttgagatggctcagtgtgcaaattttgtgcccctttacggtcggatgcaagatttgtacatcgcagcaactcacaaacatggtttgggaacttgacttgtaggttttgaaaacttctctaagatgatccatttgttttaaaattaccatctttttccaggataaggagagccttgttatgagtctgagttaagaaaatgtttaattttgtcagcttgtcctagcctgtaaagagttgcaacccttcccatgcccatgaaaaaccttgagtaggatcaatagtctcaagaacaattttgcccaaaggattgttctatggcatgtatgcaatacaaaatatcttcataatcattgtatcatttcatacatgcatcgcatcatttcgttcatcttgatatcatagcatacatccttgcctttttgagcaaaagaaaagtcatcgctatacatgccatccagcatcccattttctaccacgacccaagtatatggatgcaaataatgagaccgtcctgatgcatccaagtatgattcgacaaatattcctagaacaccttgtattagattgcatatgactaattatcacttggagaacaaatatttccaacccctaagatgtaacccaaagttttgttcaatttatctatattttcccaaccgccttacttgctgtcttaaaacataaatttgtcgaatgtgagatcaacaaggttagatcatgaccgtagaccatgaagacttgaaccttgttacatcctaatggttagagatacttaatctggtattcttgaaaagttttataaacatttaaaatcaataatgttgtattgttattagaaaacaacatagccatgacaccttagatcatattccaccaatcaaacaaggataggttttcataccaccctcaccaaagacaaaatcattgtaagaaccacataaataatatgaattcctaagtaggctgacccttattcgacaacacttctatccacgacccgacacaaatctcggggacgtgatttattttaagggggatagactgttacatacccgaactttaggatttaaaatttcatgtcaaaatagttggaagaaaactaatccatttatgtgaacctcaaatattcattttgaagcaaggtgaagacaatccaacctttgcatatagagaatttaagggcgaattaaactttttcctttccaacccaaaatgaaaaattttgagtaacttagtgtggccatgcatacacgtatagggcatggttacgtttgagttcttctgtgcatgttgggtataaaactaagtttaaggatatcacctcacgtcaagaagtgctcaaatataaattttataaatactcaaatgcatttctataaataaaaacacattgattttattaaaaatattttggttgcaggctagagttacatttgtttacatcttattgattttattaaaatcgttgtttggttgtaacaaacgatttcttggtttctttgtagaggctattgtgtacttttagttggattccttgactttgaaatgtttgtcttgcatcgattcttcaaatatccattttggagtttccaattattttggctgtcacagtttgtcttccttaagtttgtttgaactttgatttctagtttatgaaaacgaaatattctttagcattcaagaccaaccattttattttattctgacattaattttgagcttatatttgagttgtagagttgggtctctctatgtattgaaaacaaacaactttgttgtgagctggacccatgtattttgttgcatcttgaagcttttatgaaaatcgcggtttctttgtttcaaacgtttctaggtttctcccttgacgctacaattctgtctactcacttaaactttatgctttccgttagattactttattttcaaatgttctcctagttggaatttaaatcttaacttttgtttttcgcgtaacgggttttgtaatcaataagtttcaactaggtacattaagtttgatttctacaattactaactttctcttttttcatttattttggactttaaagatttactttagttctgaaatctcaatttcctaaattttgtatgaacttttgtttactagtttgtgaaaagaaaatagttgcttgcatttaaaccttgaggttgttttgtgctctggcgttttaatagtagacttataactaatttaatttcagagttatgtttccctgtttatcgaaaaaatattatggttgcgggctagacgtctacttttagttgcatcctattgattttatgatgactgtagtttgcttgttccaaaagatttattggtttctgcgttgacgcttcatttttcattcataagtttaagttttgtacttttagttcgatttcttgattttgtaacgttcttcttgcatcgattgttcaaatatcctttttggggtttccattttttttggtgtcacggttcgtcttcctaaagtttgtttgaagtttgttttctggtttaataaaacaaactattcattttgcattgatgcctaagcattttattttgctctgacgttaattttgatcatataattgagttgtagagttgggtctccctgtttgttgacaacaaataacgttttgtgagatggacccatgcattttgctgcacatctaagcctttataaaatcatggtttccttgtatcaaacatttctagttttcccccttgacacttcattttccatcctttcgtttaaaccttctgctttcgtttaactttatgtttttaggtggatttctttaccttcgaacgttctcctctattaatgcttttgacatgctatttggacttcaaaacattatttttgtttctcgagtgacggttgttttttcatccttgaatttcaacttggtacttttagttcgatttcttttgttacaaagtttttctttttcgattttctatttggactttaaagctttactttagttctgaaatgttaatttcctaaattttgttcgaacctatgcttagttatttgttaaaataaatatttgcttgcatttaaaccttgcgtctttattgtgctctgacgttttaattttgctcttataattgagttgtagagttttgcctccctgtttatcggaaacaaataactttgttgtgagccgggcccatgcattttgttacacgttgaagcttttatgaaaatcacggtttccttgtatcaaacatttctaggtttctcccttgaggattcattttcaatcctttcgtttaaaccttatgcatttagttggatttatttattttcgaacgttctcttgtatcaatgcttttgacatgctatttggtctttaaaagtttggtttatcgagtgacggttgttttttcagccttgtgtttcaatttagtacttttagtatgatttcttcaattacaaagtttttcttttttgatcttctctttggactttaaatatttattttagttctgaaatctcaatttcctaaattttgtttgaactgatgcttaatattttttgacaagaacatatttgtgtgcatttgaactttctcttgtatcaattcttttgatgttctctttggactttaaagcttaagtttagtttgaaatatcaatttcctaaattttgtttgtacatatgcttactagtatgtgaaaagaaaatatttgcttgaatttaaaccttgggcttttttgtgctctaacatttttatttttgacttataactaagctctagagttacgtctccgtctttatccaaaaaaaatatgttggttgcgggctagatgtctccatttgattgcatcttattgattttgtggaaatcaaagtttacttgtctcgaacgatttattggtttctctgttgacgcttcatttttaatccataaattttctagctccatttgattgcatcttattgattttgtggaaatcaaagtttacttgtctcgaacgatttattggtttctctgttgacgcttcatttttaatccataaatttaaaatttgtactgtaagttggattccttgattttgaaatgttcgtgcatcaattcttcaaatatcatttttggagtttccaattttttttggttgacatggttcgtctttgttaagtttgtaaatttgaactttgttttctcgtttataaaaacaaaatattctttagcattagggccttatcgatttattttgctctgacgttaatttttgaacttataattgagttgtagagttgggtctccctgtttatcaaaaacaaatcggaaaactttaagctgcgcagctggggcagccgctcacgcgtgccatgtcggattgctacagtgcgcacagtggaatttagatataaagtcctccggtttctgcgtaattcgatctagctccctcctaaacagtacctctgaggtattatttgacatagacgcccttagaaaatatggatatttcatgcgaagaagagaaaaatcacggattagggctgcgctctaaaatgtggaagccgagtggctttttggcaaaaggacactcactaacctgaaccatgccccaacccctagcctctgaaagcgcatagaagtcaacgcgataatagattgaacacggacaagatgtcacgggcgaggagattggaagggggattgcggcgaagagagtatttgaacgcagttgctgggcatggccctggaccttgtcagcgcggcgaagccatgtttggcaccacaccagcgaggcaggaaatacaggagatgtgatctgatctcaattgaattgacctacaaatttaaagcaaatctaaggaataaaatcctagcaacttaagagatatagaactaacaaactccctaacaaactctaaaccggaccacacactattcctcgtaacgcattgccgtcgctgctcctgttgcggtgtcgtttatactataatccccacatgacatctctccctccctggagaagcagctcatccgtgagttgaaaatctggataccaagaccgaaatccatccagcgacatccacgaagctttagctgccggtttatccttccaatgaatgggaacttcgcgaacaccacgcgccaaacggctctaggaagcattggccggctgtaaacaaacttgaccatgacgagtgggtggcaacagtggtactagctccggcggaactccgtgaaatggcttcaacaaccccacatgaaacacgtcaagtaatcgagtgcccgggggaagatgaaggcgatacgccacagcgccaatgccaatgcatcccagcttgtcgcgtcccttgacagcgattgacgcaatcggacggtgaagcaaacgaagccaaacccagtcgcccacactgaactccaatgcacgatgcttgccgtcatacgcagccttgtaagtctgttgagcttgttctaaacgatcgcgaaactgtaagtctgttgagcttgttctaaacgatcgcgaaacgcccttaggaagtcatcccgctcctgtaacgtctgttgaactgcgggcagacgagatgaactcggatcgtaggcacgcagcgtcggcagctcgtgacaatatacgacgcggaacggcgatgtccgaagtgatgactgatacgacatgttgtagcaatacaccgcgcacggttgccatcgaagccattgacacggacgattcctagtgaaacatcgaagatacatcacgatgatcttgttagtcacctcggactggccatcggattgagggtgaagggctgatgaaagattcggctgcacacccgccaaccggaaaatttcacgccaaaaagggctgctgaagactggatcttggtcgatgacaatggagaccggaacaccgtgcaagcagacgatctccgcgaagaaggcagctgctaccgatgtcgccgtgtacggatgagaacgggatgaagtgggcaacgttacgatgaccgtcttgccatgttctcgcgggagcccctcgacgaagtccatagcgatgtcagcccactccgccgaaggcaccggcaaggattgcagcaggtcggctggatggaggtgctccgtcttgttctgttggcacgtgcggcacgcgcgcacgaaatcttgcaccgtcactttgtcccgcgcgatatggaaatacgcacaaaggcgagatagggtcttttgtgttagtatttcaatggttactctcattgataagaggatggcacccaagatggggcaattttctggttttcttccgttcacaaactcaaagccatgccgtcccgggggaggttagatacatatatatatatagccatagctggctggatggctggaagctagtctaaaattcgaaatttggaagcataaagcataaagtagatgctagcagagatgttgtactaagatgctaaaagtaaaactgaaagatgctaaaagcaaaactgaaaggatgttgtcctaaaaaggagaaaaacaacctaaaagtaagggaaggaccacaaagaccaaagacctagcttattccatcattctccccctaagtcttgtgcgtcgtctcgtgggaaagttgggtcatcccaatcctggagcaaagcttaaagaacttgatcctcccatggggcttggtgagcaaatccgcaaggtggtctttggtgttgatgtagctcgccctgatgctcccttcctctaagtagcctcggatgaagtggtacctcacccggatgtgcttgctccgttcgtgaaaaacggggttctttgccagggccagagcgacttgttgtccaccctgagctccaccgctccagtgtctctgccgaggagatcaccaagcagttgagcaagccagagcgcctaggtcgaagcggtgaaggccgctatgtactcggcctcgcagctggacagggccaccacctgttgcttgaccgactgccagctaacgaggcactcgccgaggaagaagagaatcctactcgtgctcctgctggtgtcgatgttgccggcgtggtcgctgtcgctgtacccgacgaagtgtgccttgccaggacacctcgggtagtagagaccgtggtcgagagtccccgcaacgtagcggatgatcctcttcacagcctgctgatgctccgtcatcggtcgctgcatgaaccgactaacgtagccgacggagaatgccaagtccggtcgtgtgtgggtgaggtagcgacagctccccacaagacgccggtacagcgtagcatgtacctcctccgtcgtgctatcgcggcatagcttcagtctccatcggagtgagagctgggttgcagtcggtgagcccagccaactcaacaacccgcttggcgtaggcggtctgtcgaagtgtgatcccggagtcgtcctggtgcacctcgatcccaaggtagaaggagagaggccccagatcactcatctggaaggtggccttcatctcttccttgaacgtcgccacctccgcatccttggtgctggtgatcaccaagtcgtcgacgtagacacccaccagcaaggcatttcctctattgccctgccggtagatggtcgcctcgtgcgggctttgctcgaagcccatccccttgagcgtgccctcggtgcctgccgcaagccgtagagggccttgtgcaggcgtagcaccttgccctccttgccggggatcgcgaaaccccgctgctggtgcacatagacctcctccttcaactcaccgttcagaagcgccgacttgacgtccatgtgatggatgcaccagccttcctgagcagccagcgcaaggaggagtcgcacggattccatccgtgccacgggggcgaaggcatcgtcgatgtcgatcccctcctgctgcacgaaaccacatgccaccaagcgaaccttgtgcttgacgatggctccggcttcatccctctttagcttgaacacctacttaagggtgatcgcgcggtgaccacgagggaggtcagcaagctcccaggtgcggttctcctgaaccgcgtccatctccgactgcatcgcggcacgccatgccgcgtgtccctcggcctctacgaaagaccgaggctcactgtcgtcgcacgcaaggtgcaactgcgcctccaggtcgcgaggcaccagtcccggcactagctggtcgccgaggaggtccttcatcgtacggtaccgcagcagctcgccgtcgtggtacgcgtcgatgcgctcctcgttgtgggagagaggagtagcaaactccactgggctgtgctcaacgcgagctggcgtcggagtggacgtgcccggaagagtggctgttggtgctggagtgcatggggtcgccggctgtggtggtgtcagcgaagagctcgttgtagtcgaagtcgtggctcgagggtgtgtcggtgtaggagtcggtggtggctcggggactggggtagacacgctcggtgaagaagagctgcctactctcccagctccctcaaagtggacgtactcgacagtgaagtcctcgtatgttggagtcgaaccatcgtccaccgccttgtcccatgcccaccctcgcccttcgtcgaacactacgtcgcacgccgtgcgcacacgctgtgtctccgggtcgagaatgcggtaggccttcgagccctccgtgtagctgatgaacacccctgaggtgctcctatcgtcgagcttgccgatgtggccaagctccttggcgaacgcgaggcagccgaagacccacaggtgggagaccgccgacttgcgcccatgccaagcctcgtacggtgtcctgccgtcgagggccttggtaggcgagcggttgaggatgtagacggccgtcaccaccgcctctccccagaagatggccggcatccccctctgcttgacgagagcccaagccatccccacaaccgtctggttgcgccgctcgacgacaccgttctgctgcgggctgtacggcgcggtgtagtggcgctgaatgccctcatcagcgtagtacgacgcgaattcagtcgccgtgaattcaccgccgttgtcggtgcgcagcacgcgcaacttgcggccgcactccgcctccgcagcagcctgcgcacgcctgatggcgtccgcagcctctcccttgctgccgaggaccatcacccacatgtagcgggagaggtcgtcgacgagcagtaggaagtaacgtcgtcctcctggtgtggccggtgtcactgggccacacaagtcctcgtgcacgagctcgagccgctccttagctcggaagctcgtctgctggggaaaggggagccgcctctgcttcgttaccacacagacgtcgcagagctgctccacatggtcaaggcacagcaggcctcgcaccatctccttggcactgagccacctcagggcctcgaagtggaggtgcccgtagcgctcgtgccactgccacgcctcgtcgtcccgacgagcggcgaggcacaccggttgtgccacctgcacactgaggatgtagagtcgattggtgcctctggttaccttggcaagaaggtgacgacggcgatcccaaatcctcatgactccgtgctcgaccaacacgcgtgagccgttctcatccagctgccccacgctgatgacagagttcctcaacgcagggatgtagtagattctggtgagcagcctgtgctcaccggacttggcagtgaaggtgacggagccaacgcccttgatctccacgtcggaggcgtccccaaacttgacagagccttggacgctggagtcaagttcggtgaagaactcctgtcggccggtcatgtgatgggttgcgccggtgtcgaggtaccacccatcagccttgtcgtcgctagagccgttgcagagggagaggagtacctttggctcatcaaggtggaggaaagctattgcggccggtgccgctggaggtagctcgatgcttgcgtgtgctaggagcagaaccggctcttcctcctccgcctgtgcgacgtgggcctggccgcgtcgtggctgtcgacagtctttggcccaatggccaagcttgccacagttgcggcaggcgtcgtctcgtgccggcttgtggttgccggcggcgccgccttgggtgcctctgcaagcgccaccctcggcgcgtttccgcgcccaccgtagctggacacctccccgcgccttgcgcggcttgcggccgcctgtcaggggagatgactcccccttcctcccgtctccctggctggcctcccactgctcttgagtgagatggagctccccccagtggtgataggccttgagagaggctgtggctcatctcgacggctctctcctcgtcgtaggtgtcgtcgccatactgcaccatcttctgcaaaagagtgttgagacggagggcaaagtcatcaacatcctcacctggcttgaaggccaggttctcccactccttgcggagtgcctgcagtgtggacttgcgggcgcgatcgctgccgatgcgtgccgcagcgatagcgtcccaggcctccttggtagtccgcttctgagaaagcgagaactgcaactcgggtaggactgcggcgatgagggcatccagcggtcgttgatcctcgtcgtagtcgctgttgccgtactgaactgcctcccacatgtaccgcacctggagcctcaccctcatgaccgccgcccactcgatgtagttggttttgtagagggtaggccacccaccaccgggaccaaggtccctgaccaccgtctggacaccgtggtggtcatgtcgccggttaggggagggagagccgcgttgcctgcgagggccgcgctctccgtcgaaccagccacctccactgggagcaccgtcgccgcgcgcgtgctccgggctgccgccggcacgcccgcgcccgctcgggttcccgtcggcgggcgcgcggtctcttgggccgccgccgccgtggggtgggctgctgcccaccgctctgcccgctcccgcgcccttcctcttgccagctcttcaagctccctgtcggcggtgatgtcaccggcgatggagccattgatgctgctgcgcaacgtgtcaacctctacctccgccgcacgtgccgcatcttctgcctcctctgcttccgcctctgccctggccgctgccaactccgctgccgccaatatggccgccctcgctgctgctgcagcggtctgagccgttgctcgcctgcgctcttctgctgcggcgagctcgacgtcctgttgacgccgagggctcgaggcgaccgaacgccgagaccgtacgtcggacatggcacgcctccgggggctgcttcttggagaagtggaagggaaaggggaaggagcagccggtgctgctgcagcagctggctgaatgctccctcgaacttgggaaggggaggaacacgagatatttagtctacaggaaagtgtagctctgataccagatgttattatttcaatggttactctcattgataagaggatggcactctagatgggcaattttctggttttcttccattcacaaactcaaagccatgccgtcccgggggaggttggatacatatatgatatatatatagccatagctggctggatggctgcaagctagtctaaaattcaaaatttgaaagcataaagcataaaggagatgctagcagagatgctgtactaaaatgctaaaagtaaaactgaaagatactaaaagcaaaactgaaaggatgctatcctaaaaggagaaaaacaacctaaaagcaagggaaggaccacaaagaccaaagaccacaaggcttattccatcattttgtgttccttcaggtcccaagccatgcgccggctcgaggatggtcggcaatgatgcggacgacagcggcacgaggacgcagcccttgaatgtgatgaggccgtctgtgaacgcccaggctggcggtttggcacccttggcgatgtcttcgtgaatggggaactgggtgggtgtggaggctacctcgcgggacagctcatcgaacagggagaattggggcgccgataaggcgaacacctccgctaggtgttcgtcccgtctggagagcgtgtccgccacaaagttcgccattcccgacttgtactgcacgccaaagtcaaacccgaggagcttgcatgcccactgatgctgtggaacagtggagagacgctgatccaagaggaagcgcaagctgtagtggtccgtgcggatgaggaagcggcgcccccataagtatggccgccaatggcggaccgcctggacgaggccaatcaactcgcatttgtaggcagcgagcttggcgtggcgcgacgcagtcagcttgctgaagaatgccaccaggccggtgccttgatgaagaacagcgcctaggccggagcccgacgcgttgcactccacgatgaactccttgtcgaagtccgggagctggaggactggggctgccgtgagtgcgtgttgtagctgccggaacgccgatgtcgcggcgttagtccagtgaaagtcctacttccgcagcagcgctgtgaggagcgcggcaatggtgtcgaagttgcggatgaaacaacggtagtagcccgccaagccgaggaagcccctgacaatgcgcgtgttcttgggcagcggtggacggaggaggctagggtagttgacgcgggaaggagcaaaatcgaccaatgccggccacatctggagcgtaccgttccacgggttgagtgccgagggccaattggctgactggccactgctactgggtggttggtactgctggggcggttgctgctgttgtcctctgttgttgttgttgcagcgacggttgcgggttacctccatgtcgactggtgttgttgccacgatttccagcgttgccatagccagtggagtgtgcgggcttgcttcctaacggcaccccccccccccggaagtggaaggtcggtctccagtgccggcgaggagagcagtagaagcttagcgaggacgacccttcgtcagatcttcgagcagaagttgagcatgtacttcggaagttgagcagaaggtgaccgaatttttcattcaaatcttgtattgcagttagggaaagagtgcggtcgcccacatcacccaagtcatctgccatggtcttcaagaggcagcagtagtcgttgatgctcaaatcatcttggtagaagatgtaaaactcggtggagtggatgagagcgctggactcgcggttgcccaagaactgatatttgaggccacgccacacgatgcgagccgtggtgttgtgcgtcatcacggactccagtaagtcgatggagatggtgccgtagagccacagaactacaacgcagtcagggccggtcctataatttcgagggccctaggcaaactcgacgctataggccctaattttttttatttgtaatatatactctataaatcatttttttttataaagtgacattaataaacactactgaacagtaaattacacaatgcaaattgcgatatggtattttattcttaataaatattgctgatagtataataaacaactaaaagaattgtagaaacaaaatagtatgattattaataccttaaatatgaaactgcaaatatacaatacctctcataaaaatctctgcttcaagcatttctgacgcaacattctgacgcctgaaatttccaactaaagtaaacaacaagaacatcattagaagtttattgcactatatcaacaggaacaaaacaagaccctaacctaatttttgcacaaaacaaaaccctaacctagttagaagtcctcaccagtcacagtctaaatagatggttagaggcaaatgagattaagagaaaatcaaatcattagaagtcctcaccagtcacgattaggtttctggctgcctgcctggatggaggctagggcgttgggagcgctagcgcctgctgctgccgtctctgccggagtagagattccggactccggagttgtgactgatcacacttgcggtcacgccgtcgtcagttgccctcgctcgtcggcgtcgcgtcgcggactcactgtgtgggggcatcatttggcgttgacgtcgtcgcgtcggctatcgtcaggaggaacaacaagcacagagaacgaaccggcgcgatgatgcgtcgcttcgattacgtcgcactctcgcatctcctactctccttccctactaattgcatcgcacacgctacgccaactgggctgcggggtggcctgcaaggcctgtgcagcaggagggggaatggggtgggggtgggggttgatgggcccctgctggcctgggccctgggcggtcgcacaacccgcctaggcctagggccggccctgaacgcagtccatgcgcatccaatcttgatgatccggcctgtagaggttggtgaggacatgatcggcgagcacgtacttctcgagggtgacgaggatgagaccacaccattgccgaagttgagatcgagggtgacgggcacgagagacttgatgttcagcaccaagactgcctgagcgtggagattggcggtggcgtcgtcgtcgaggtcgacgttgtagaagttctaggcggtaggggcagaaggagcagcaccggtcatcagagggatgaaaccaccgtagccgggaggaggtggtggtggtgcaccggctgccggaggaggaagacccagtagagggagtgttgccgatgtagcgctgggcgtgatgaagaaggcagagacgtcctgagcaggcagagcggatgcaaaggcgtcggaggtgccgtagaggccatcggtggcaaggatggccgtgagctccggcggtagtgggagagaggtcggcggcagtgtcgtgcctgcgggggcagtggtgaagagcctggcagacatcgtcgcagccgtcatggtggcagtcgcggccgaggaagaagagttgccgccgtggtgggtgttgccggcgatggaggtgtcagtaccagcttctcgatgaaagaggcaagggctttcctagtggcgcaggcaacagtggtggacgccgtgtcgacgacggaggcggctatggctaggtcgacattaaccctagatgagggttggaaggcatcccgaactgccttggtgatgacagatgtggtggcctcaattgcgggagagggggtatggggagcgttgttggccatggcaaaggagccatgcggcggcggcggcggcggcggctgcggcagcggcgacagaagcgtgcacagcagaggagcgcatggcgcggtgcgagatttagagttggaggccgaagctaaaagcatctgataccatgaaagcgtataagtcaacacgataatagattgatcatggatagagaacatatatagggacggtggacccgtatctctacccgacttataggaacagaatcaggagataattaggaaaccgaacccaatacaaatatgactctaacagcctctgccgcccactcccactccctctacttctcccgcgccgccacctccacctcccctcacaccgtccctgtcgctagttttgccgcctccccgtcgcgccgccgcctccacacacccccccccctgccgccaagcgccgcctacgcctcctcatcgcactgccacctctgcctccaactcctccgccaccgccatcgccgagcactgccccagcaacgtcctacactgccgccgccattgctgagcgccgccattgcattcttcgtcgccattgtcaacagctgctgctgcgcgctctattgccgccgccatcgaagaaacgccggtggtgacagaacagacgtcaaggaaggcggtggctgcagcgacaagaggagagccgtacgttgccaggccgttcttcgctcaacctcgctgttgtcgcgggctccaaacctagatgacggtacaaatccaatggagcttttggccgcttgctgctcatcacctctcaggtcggtcccctctctccctcaggtcatcgtcttcgtttatccccatctaatatctctaggtaactgatgtacttaaggatactaaattttacattagaaaatacattacctttcttgaaaaccaaaaggacgcgtatttttaaccagagtgaatattattttcttttgtacatacgattaattggaattgatgtcactccaactcttcaagtccatacttaatatgagtacatttcaggcggcccaaacgggggacacaatcctcctatgtcgccgggacatgcataactcaaatggagaaaggacatggaaggatttaagcagaggcatgaacaactagaatgtgcactgcttattcatgttcttccttctgtttcatattgctcatcaccgtcgttctaggatttaattttgtattaaattatttgtcgttttcacgatccaaagaacttttaaaggtgattgatattattccctccctacctatagtaatgtagcaatacatattgatgcggtcataattggctcatctgctttgaaaagataattaattaagatgtactccctccatactcataaaggaagtcgtttaggacaatgttcaagtcaaactttgggaatataaatcatgaataactctaaagttgttgagtttgaaaatgtaaagattatataaatatatttgtcttgaaaaatactttcataaaaatatacgtatatcatttttcaataaacatttttatagaaacaagaagtcaaagttgtgttttggagaccgtgtcgctatcttaaacgacttcctttatgagtatggagggagtactatttgacaagggtaaccatgtaatctttcacatcttcatggtttgcacggtatttgcctggatgacaagtaaattgtaacagagagagtatatagttttagacttttagtgtgttccttccaatataagaaggggcaattgctcatttcaccttgtagtctaaccactaattttttttgaacgactcgcacgagacggtgcgaagttctatggatagagccggaaaaaattacaagattacaaccatggagggtcgtaaccaggaaaaagaaaaaaatataccaccacccacacaccgacatcgccaacacacaagcccaggaaaagactagcaccggaccggccgccgctaagcgtgaccgaccgccactagaccaacaaagagacacagacgagatcgcgccatacggaagaaccgccgccgccatccgtcgggactcaaaagagccaagactgggctttcgaccagcaatcacccttgaggagagagacagcacaacaacgcctcaggagggggaataaccatcgttgtcggtctggccaaggctagactgggttttcacccgcctctcaccacctgcgaaaccacggctgacgcatcgatgctccaccaccacacaagctttgccgacatgtgggacccctgcaccggcgtcccccgccagctagccttcgcgcaccgaaggccgcgtcacacccaccggcagctcctcacacctaggtctcctcctccaccgctggccgcgcctctctgcgccaagccggcctcctccactggacgcgcctctcacgccaatccggcctctctccatcggccgcgcctctcgcgccaagccgacctccatctccgccgcccgcgcctctcgcgccgagccggcctccggtgccatcggctgcacttctttgcaccaagccagtctccgacccctccaccgaacgatgccgtgccggccagatgcagccgtctcccatgccctcggctagtcaaccgaggccgccatgcctccggtgaccgcagacacgctcaccaccaccacagccgctgctgccgaatacccagccacctcaccgtcgccatcctcacctcgcacccgactccttccccgacgccgacatcaccaccgcttccacagtcatggccgccgtcgccactgccaccgacaccagccactgcctccacaaaccgccactgcgtcgtcaccctccaccaccgagcagctagcagccgcctcgacgccatgtcttccaccgccgtcgccagtcgacaccgcagccacctgccgcgactgccgctagccaccctctagatccggccgagaggcgtggatttgggggacaccgccgccgtcgccgctgggcaccgcgccgttgccgccacgggaccgccgccgccgcctccacgccctcggccgacttcgtccccgccgccatcgccatcccctccaccttcagccaccgccgcccagcgcggcgtgcccctgccatcgccgtcgccctccccgccgccagtcgctcctgtagggtgttctttcctaacatatgctttaaacatggttaaaacttgaaaacaacaaaattaccccatcattcctctttgttcctaacaggaaaaaaaactgataattttcatcattactttcatgcctacacattagtaatctagtactacttcacttatccatggatccagaagtatcggcacactgatatgataaaggttattaatgcaccttttctgctattaagaaacttcaggctgtaaaaggggggccaaggctgtttaatgtttatgcaacatctagttctactggttgcttgagcttccctcctgatgccaggtgagatttgtgaacacatttcttgttgccattttttctcagtgggatgtggcattccttgaatttaaagctccaatggtagtttacatccatggtgagacttcagattctctggtccacaatagatacataataattatagtctgtcacataattcagaattttgttaaatggtttccagtgtcctacttaagtgaaattgttcagtgaaagatccatgtaaaaattttatggcatctataaccctttcgacatggatctttaatatccaaaggctacattttcttccgtaaatagtcacaataatgttgccaccgcaggattgaagcacattgtgaagttgaaaggtgctcactgcaatcatgttgtacaggtatgtcccgttaaacagtagaatgaagggagacaatagagttcgatgggtgccaaatagaatgatgttgtgtgtcccaaaactctttatttcataacagggtctgtcaagttctatttgtcccagttagttgatgctacagaaaacttctccgacggaaataaaattggacaaggtagctttggctgtgtttacaaggtactctcttcaatagaaaaaaaaaatgtcatcctagatttgcgttcaatcatcttctattcattttagtgagacatatatctagaatatgtaatttggatttaccaaaataacatgattattttttttcatatacatcttcaatgaagacaagccaagaaaaattaattggttgaagtgacttcttattgactttgcaaagtaaaaaaggaaccaccttatcttgtccggaggagtaatgaatatgcttgcttcacaaaattcagtttccatactttgatatcataagaaacagatcatttgcttttcctactgttattcatgtgtttactgtgattccaattcatcctaattaatctttgaggatattgcaaaaatcatagctatcaaacgacaatggaatgtgttgtaactttagaaacttcattattatataattggtttcttctttaggtcaactgcactttttgtttgcagtcagggtcaactgcacgatgggcttgaggtagctgttaaaagatgttttgagttaccttgttcacgtaatcaaatggatttccaagatttggagttccaaaatgagatttgcttccttgggaagcttcagcacaccaatgtagttaagcttctgggatactgtattcagggaacagagaggattttggtctatgagtatatgctgattggaagcgttgataccttcatctttggcatgtgttcagtattacttcacctcaattttggatcaaaagttctgtgcagactatgcttagttaatgatctcatttgtgtttccattttataggtgcaagaacaagaaggttgcatctggactggtctacacgctctcggataattgatgggatagctgagggactgctttatctccataagcactgcggactacatattgtacatggagatctgaagccaagcaacattcttctggactccaacatgaatcccaagatctccgattttagcctggctagaaggtatagtccaggtgtagatgaagagtacgccgatcgcatactggggtcaatgtaagaacttatcagatcaatatcacaatttttgatatcccagcgggctcttttatccttcttattgtttaagctcttaatttttgtttccacattttagtggttttattgctcccgaatgtcgggaaagacgacttttctcaacgaagtctgatgtgtatggctttggagcattggttctcgagatcattagtggaaagcgatgcttttcacttgtgagtggagattctggagacgactatcgatttctgaacaagagggtgtgtagaatttttgaaatttgtctcgaattttgaatattaatggtgcccctgtcatcatttattaacttgcacaaccaagtgctaatttaatggccaatctatatgagaatttttgtttttcttacccacttcctcagtcatggcacttatggagaacaggaagattgatcaagcttgtcgattcgccctcaggtgatgaattggagacgagagagatactaagatgcattcacatagcactgctgtgtgtggaggagaaccctgccaaccggcccaccatgcaggaggttgttctgatgttaagctgccagactgctctgctgcctaaacctcgttgtccagcttacctaagggcggaaattgtgtcgacacatccatagcagtatagcacagcttttaccacaatgacaacttatggagcttaggattcatgtgcatgtagtattgtttttccagcagtaacctttttgatgaggatgtcaaattcttgagcttttgcctacaaacacaaatggataaaacatggaaggagtccatatttttggaagcttcttcaagatcgtgtttgctttccctatggggattgaggcccctgttctatcactctgaatttgatgaacagatctgcattccatctttaccacctttgtattatgtaggagtatatgccaataggtgaacagtgtaccataatgttttaccagcatggtagaagcataagcatgcatggatgttcacacttttcgtatggaacaaaattcagctgactgctttgttattttcaatcataccacgagtctcttactgccagccttaactgggctctgtaataatctttgctcagtggtgtgtcggtgcctgtttggatatatgttgattaaatgcaaatctttttggatatattcaagtacaaccttttcgccgtcaaccttgtcatccatgctgcttggaactacaatggcagcgtgcgtgtttgatttggttttcttggtgggaatgcaatttgtacttcaggaatttgattgcagtttagctgctgacaagatgagccggaggtgtttgtcgaaatgccacaaggaggagataggcctcgtctttggatctttagagccgagggggatgacacgcccaatacagttaggcgcactgtcgtcctgcatttccagtatttgtttagattccaagaaaaaacaggatacggtggtttcacatcctctgaccgctgcaaaacgaataaatactcacatcacgagaaacagagatattgggcaacatgctctcttcaaattatcgcaaatcagggattttttattactctatatcatctttatgttcttccttttgtagaactttgccctagtaagtctactgaagttgctccaaacttactttgtgtatcgtgatatagtaattaggtgttgttgctattgtttacgaggaactatgtacaggactattcacagaaatacattttgccgaaggaggccaaccgagtatatctatctattattatctgctaaaaattcattaaacttgctacaaatgctctaaggctgccatgtggcatcctataagatgacttttatggtacattctactgctagtatacactagcagtatatacaagggtagttttagtattaggtaagagtctgaaaaggtctttttggtcatttaaattagagaattaatttcacccggattaattttccttcgttagtttttcctgtggatgtcgtcatccgtttcttctcgtcacatctcgcgtctccggcgtcactgcccctggcgcacatcgctcccgcgccgacgcttccgtaccgattcctccggcgccgagagaagcccaacctccacgcgcccggcgtctccctcgtccccggcgccttgcctccagccctagcctattctctcccgcatccgacctcccacagcttgtgccttgcccaaaccacggcggtgagagtgcactcgtcgagccggcagcctccccacgcctcccatctccgtcctggttgccctgtctgccctgcagccactggagtgctcctggtaagacgctgacctaaatttggtactattgttttgattaatttatgcaatggttgttttgttctgcaatttttgttgtgcttaaccttaatgtcgacatgaaaatttactatcttattatgaaaaagaggtgagattttatcttgttgattgactttgttttggacgatctgcctcagaacactaggttgtatttgatgagacaagtaggatgaaaatctgcattctgcaactagaatcgcattaatcctaggtatatagctatatgagtgtgctatgtaaaattaatgtagcagaggtgcaaattgtgcaacttaaatttggtttaaattaaggtattatccatatatgtaataaagctggttccatcgaacgtttatatcacaggttatcataaatcatttgttttaatatttgctaacagtctatcaagcctttattactttgtaatttgcatgatgtttttcgcaaagttatatcacttttatcattattcttacatgcaattttcgaattgtgttgtgatctgtgtgtgaaaaatctcgtctttgtagacacttgatttatgtgaagacttgcaaatttgtaaagatttttgttagtgatgttaacctatattttaattatgctgatatggttcttctctttgtgtatttttactgtgtattaacagttttaaccttaatcttttccttaacagagcctggactagatggtggtggtggttgtttttcggccatgaggaggaactgtcggctgacttcttacaagttccactgggcgtgccaaaagcgtgttgacagaaaacacgaggcctgggagatctgcttaactccagtgcaggtccaaagctcgccttcaggtgtattagcgtgccagttgatttgatcctgtaatcaacaagaaacagaagcaaagaaaccgcggttaaatctataaatgatagcacatatcatttatccttgagccgatgtcatatatgaatcgatcggcagttgtaagtaggcaataaagaactaaatctgttcgatcagctgtagatatttctaatatatagttcttatatcgatatatacttaaatcaagtgattggggtagatcggtcaccatgccgagacagtataaatcacttagatcgaagtatatattaacaacaggactatatatgtttatagcatagccgatcaaatagacctagcatgtatcggctaatactccgatactactctatatcaggatattaaaataggtataatatatcaaacaaaggcctaatatatttaaatatagcaatatcttgattaaagggcaaatttaacgtatcaatgaagcatataaagcaaatatagttaaatcagataagatcggctgaaactctgatgctaccctaatcggcaaccagaagataggctagagattgatcttctaagcacgacttaatagatcaaactcaattaatgcagcattaagtatgaaaagaagaacaatatctagacaatcaagtcgctggaagtttcatagagtggtaaatatcttatataatctgagtcaacgtcagaatttaacctaatcggctaccttcctcgatagatgttagccgatcgtaggttaaaccgcgatattgccggagattatgtaagatatatgataactcgacgaatcacataaacaagattagagtatcatgaggatggaagcactaatcttatgaacgcaagccatcataacaagttttacctcttgttgaagatcgaaaccgatgcagctcaacctgaaagcaagaactcgttgaaacaaaactaaatcaaaagggtggcgatgcgccgaaattgtattgaacgtgtgtgttaaaagttacatagggctcgggtctatttatacccaagaattacaagatatgtccataacggacacgactgctatctctaacaaactctaaaataccataagtctttgcggcagacttttgccttaagcatatctctaaggaaattacataaaacatcctaattaatagatacaattgccttctcaggactctatccatgtgcggcaatcatcttgaattatatcgtctcaatccgatgttgtacaccaagtcgtattgtcggaatcggctgtatcggcttacctagtccgactcagacccagccgatcctaatcgtagccgatctggactccagtcgagtcctgttctgtttccgaactcgatctccaccttcgacttcgctttgatctaatcttctttcctgacaccgatgttactaaatttggttgttaacagtcgcgtggtcaccactcccatcttccattgcctggatttgaggagacaggaagaggagaggacatggggaaggagtagaggatgatggaggagagtatgaggagagtgtgtgagagagaggatacacttttttttagtggaaaagggagtgggaagctagcctggtaggctggtggcaagcgggccacttaacagccctgccagcgaaaatatgcttattttcacatacgggcctgttaaggcctgcttgtgacccttgagctgtttatgggaagcgacatttgcagatgcgagcagttatgatccactacaaattaaagaggatcttttccactaaaattaattatgtagtagtgtaataagtaataacaatctttcaatcgatgcaaattggtgatgtataacgtgcaccaaatttattcagatcagataattacatacttatacgaaactactgtgtgcacgtacgtatcatagccacacagtagtccattgggacttcccaagtgacactttggttgctccaaatctctgataactaaggctgtcggccagacgggtggccgccgccgatgcaaccctccggcgggcagaccggcgtcggcgccggctctggctgcgtgcgccatggccagtgcacctgtggagctgcaaaacgagataaaacaaattaattctattcgtcacattcatgagtgaaactgtgaaaggcctgaggaagaagaaacggagtgctcagctcgatgatcggtgctcacagggagggctcgtcggaatacggctgccgtccaccaccagctggcccaccgccggcggcggggcgactcccatcttacaccggtagccgctcgtcgccgccagccacagtcagggtttcactatatcggtttagggctttttgatcgggggtcaccgaaatcccgaaatttcgatccgaaatttccaaaatttaaacaatatttagttgaatttaaacaaatattacccaaattcttgaaaaaattaaaaattttaaaaatttcggccaaactaatatcgtatcggaggggaccaaaatgaccgaaatttcggtccgaaatttccaaccctggccacagcgccagggggagctgaacgacggcgaacacacggtgtcgcctacgtcgctgcagaagcgccatctcgccgacgcgcgctaaacgctatggccttcttttttgctaataaacgctgaacaccacctacctagctagctagttctggctgcctgctcatctgctcgatcggtggcagtggatcatcggccggctcgtctgcacgtacacacttgcaaagatttgtagatagaggcgatcgatcgagtgcatgcaccgatccattgatgattgatgtcgtcgtcgtcgttgacagtgatatatacgacaaatggacagcttttggtgtgcttgattttctatgttcgtccaacacaactccgtggtttggccagaaaccagaaagctctcaatgaagaaaaaacagaacactagtgtactcaggatttgacagcagcaggtggttcacacaagtgtacatgtatggttgactaaagtttgttctctctcacactattgtgatacaagttgattcataatgcataccccccgtagcactatcaacatcatagataatctattatatcattagtgttatgttatattgataattcaaaaagaagtcactacgttcgtctcatttagaaggttaaaaatttccacattactcagataaaaagaaaagggttcgaaccataagactttggtgggccatattataccgttgcaaattgatcgatcataattgcatgcgtacaaaataccattatatctaagagatagaagctacatattgtattcggaatccaattatatgtttaagttctattttgtagaaataatgttgtatgattataaataaaatataagaattgtctaattgtatctcaaaatctagcaccatataaaattgtgctggataatccctagttaatttgatcatacctgtatatcctttgctagcatatataacctaagaggagaaaagatgtttttcaattttattttttctatgtgactaaaatgtggatcctactaacattccattgcggcatgccacgtcggcgcacggaggaggttggagcccgtttagacctatatgacatcaaagataaattcgacgactcaaaaatatatttgttgagagttcagggatctagatgatacatctatgcaagtttagggatggcctgtgtgcacttcaatcttctatcaaattgtaattgggggaaaatccaaatacccctacaagtcactagtattttcagtctcttcttataatttaatttcgtgcactcctatttttttcaactttccacctctatctatttttctcatgatccatggacctccatcacggtgtgcaaactgcaaagttgtccctttaaaccaaagttgtacacctcatcctccttgcatgtttcgctgttgcacgcgctttaataattccacaaaaggtgtacacctaatcctccttgcacctttcgctgttgcacgctttaataattccacaaacggtaaggtaacgaaacatgataattatcacatgctacaagaaaatggtgtattaaatctcattccaaaggagagaagatataaggagcaactttaccgacaccatcatgagatccatgggatgcgagaaatctctatgtgtgacgaggaatcaatgaaaactagagatagagaggtgggaagttggaatagtaagtggatttatagggagtacgttttgaacaaattaagttgaggggggtgggattggaaagcccagcgacttataggagttaattacttggatttcgcacattgtaattttgattcatgcatgaaaatatgtactaattgtaggctttaatttttcgcataaacttaaattgaaaaataagcatataataactaacacaatacaccaacggcaaaccaaatatggccgtgtttagttgctttggcaaaaacattttgatgtatacggacacacatttaaagtattaaacgtagactaataacaaaacaaactgcaaaacgaatcaattaagcataattaatccgtaattagcaaatgtttattgtagcaccacattatcaaatcatggcgtaattaggatcaaaagattcgtctcgcaatttacatacaaactgtgcaattgttttttttcatccatacttaatgcctccatacatatatccaaacatttgatatgatagaaaagttggaagtttgaaggaaactaatggatatgtatatgggtgctgaatttcccactgttccaccaggtacagttttggagtcattgagatagtcatagcctgcatatgcacgatgcatggaagggagatgacatagagtccaatttcttataagttttggtgataaaagcaggggcggatctacagtataatcatcggtgtcaggcgacaccgacgactttcggcaaaaccaataacaaaactgcttatccatatactataacatcatgttctaagcataattagtatactatgacaccgatagacacgctatgacaccaacgaaccaattttcgggatccgccactggataaaagtaataggtgtaacttttatgaaaggagaggcagtaattaatttgagcgtttttacatataattaatcaagtctaggatattgtttttgaagatgtaccaatctgatcgctcggccctacatttatactagtaaaatagaaattatacttacaagtagttgagaatacaatgcgctaaatttgcattattacatttgaaatcggaacgaacttacagagtggagtacatactaacacgtttgcaaccagagtatatatgctgaacgtacgtcgttgatagtccataactaattaaggctgacgttgctggtcggtgcaatccggcgggcagcccggctgaaaggagcggttcatgtgttgtgcggatgcgggagctgcaaaacaagggaaaagcaaaactgcgtcagtatattgtcacatttatttattattatgtcgcgcataaaataagattaacgaatactctctttgcttttgaatttatatttatgatggcgtgtggatattcatattatcacaaattaaatacagattaaaagaatacaagttatttatatttcttataataaaacaagccacgaggaaatagacgtcatttacatatagttcttgtaaataagacgaataattaaacgacatgttattcagatatatttgaaaaggaagataatatatatatatatatatatatatatatatatatatataaaagttgatatgcttagttatatatgcgcgcaattaatggcctttgaaatttagcttgagcttcgtataggtgcatgcatgtatgtatgtatgtatgtatgtatgtatgtatgtagtggtaaaatgaatctctgatcacctggaggcgacttcggtggccggttgccgtccggcagaatcggcggcgacgagacgccggctatcggactcggcggctggcggcagaagcagccgctggtagccgccaaccagagcgccacggcgagctgcaggagcgccagcaccagacgtcgtcgctgcagccgcgccatccggcctaactagctagctgccaccctcttgtaatttgttgctagctgctcaaacgatctgcacactgctcatatcttatacccgcgtttcgtgctgggtcgttattatttatagaggcgatatgcataagagcaagttcaatagtcaatatatttacatatagtcaattgggtacagctcaactattagctactccaatttacatatagtcaatatatttaatagtcaatttatataatagttacctacaaaatatactacagcattaatatatggtcatacctatcatacacacattgcattttggagtccatgttgcagctggctacttatctgtatcctgttactctttttcttatcttttatcttctcgatatgtgtttatagttggattatagtttgctattgtaccaactctaatagatatatgcagagtgaggcgtatagtaagtatatcggtcgttgtcgtgcacggacgcatatggttggctggtcgccgttgctatggctaactagtactccctccaccctaaaatataagagattttggatgaatgtgatagattctagtattataaacctggctttctattcaaattcacagtactaggatatgtcttattcatagaaattctcttatattttagaacacaaggagtagatacttctccggtttaacactataagccattttagattttgaacggatatatatatatatatatatatatatatatatatatatatatatatatatatatatggtgagattaaactacagaggaagtactatcttcgtctaaaaataaatgcagttatgaatatttgtgtacaatgtttgaccacccatcttatttaaaaaattgttgaaaaaaataaaaaattagtattattcatgttttatcatctaataacaataaaaatcctaatcataaaaaaaaattaaataagatgaacagttcaacgttagatatgaacaatttaaaactatatttattttagggaacaattcaaaactatacttagtttgggactgaggcgcagcagtagttactgccttactggtacgatgcatggatggtgtgcttaatttgacatgtcactaaaaccaagggtccatgcaggtctggaggagtcaagcagaagcggcaacagacttgtctgtccaaggagctctaaattaacactgtactgcgcactctacacgtctacttcctctgtcccataaaaatcaacccaataccgtataaaacactgtactgcgtatactacatgtctactccaaacataaatatttgtacaattgaaaatttatagatacaagttataaacatttttagttacttcattctcgccaactactcatgttttaatttcgttatgatttctgccaaccagggatttaacatgggcactgaaataattttggcaaaatttgctacaggacaccctaaaatcgtgtaattggctgtgggacaccgtaaaatcttggctttgcccacggacactacgaaagttgtgaaattggctgtgagacgccggaggcaatattttataatttccgaggcaaaagaggtcagaaaattttctaaatgaccaatctacccctgcgcgccgctacctctaagcctgactgggtctggtcgaaccagacccagccggcgctgtttccatcccccctccctccacagcccgattccccattcccaaacctaaccctaggcgacggcggcggcggaggcggcggcggcagtggcggggccggcggcggcggcgccggcggaggcagtttcggcgctggcgacggtgttaaggacggcgacgacgacggtggccgatggagctgtcatattggtaggcggccgagcggcagctaggaagatgtcgccaaggaagaagtgtgctgggaagagaaaaagcccaagagaaaaagagtgaagaaagttgtgctttctgtgcaagatcctgtcatacaagtcccaacagctactgtgtatgttgtcaacagcaaaatttcttttttatgccatacatttgctatatttactctacatatttatgttgattttcatttttttgcaggtccacaccttcaagatcacaagcatctggggtaactcaaacaagcccaataacaaggagcagggctagagctctcaatttggatgttgatgctccaagcaacaaggcagctggtgccatctgaagactgaagttcaatgacatgaaatttgcttttgtataaatgtaggatgctatgttcactgatgttagcttttaatggcatggactcctttatgtgctaagtgcactgcttttgttatggagccaatgggcagtactactcatatttgctaggcaaaatgtgcctaaagactttcatgtatggcttttgtatagaccaagcttaatggcagtggcagtaccatgtgtggcactggatgtatggcactagttgatgtggaatggcagtgagtatttctggaatggcttctaaattattgctgtataaaattttgtttactgtccaacatgcttgtaaatgtttgttgtatggatgtatgccagtttgctgtctgaaattttgccaaactgtcaatttgctgtctgggcaaattttttgccaatgtttcagacagcaaacatttactgctcagatgccaacatgctgtccaattttttgtctggccaaattttgccaacatgctgtccaaatttttctctggccaaattttgtcaacatgttgtccaaattgctcagatgccatatactactgcaaatgctgtgcactattactcaatgccatatcaaagcaacatcacagagtactgcaaaaattccaattgctcagatgccatatcaaaccaaattcgaatggctgcatttcatctgaaaaccatactacattcattaattccacagggcattcataagttcaacattacattgcttccaaatactaaattgcctattacagtccatattacttgctaatgacaactaccaaaatcaacagtaataataaagcttgcacaactccaaggtacactaaaattcgtcccactccttcaactcccttcatttctgagccaacaatccccatcagtggcacaatggacatttgcccaagggcaactcgccaccaccacggcgccgtaccactgaagatgacgccgagctgtccatcgccgcaccaaccgaagccgactaggccgccgtcgtcgccgtcctcaacactgccgcctccgccgccggccccgccaccgccgctgtcgccgccggccccgccgccgccgtcgcctagggttaggtttgggaatggggaatcaggctgtggagggaggggggatggagtcaggcttagaggtagcggcgcgcaagggtagattggtcatttagaaaattttctgacctcttttgcctcggaaattataaaatattgcctctggtgtctcacagccaatttcacaactttcgtagtgtccgtgggcaaagccaagattttgcggtgtcccatagccaattacacgattttggggtgtcctgtagcaaattttgccaataattttataccaatctttaatttgcttaagaagtatttggaggttgctacggatcagacgtccaattttgtgcaaattatcggacggtgttggtgttgtttaagaatgtttcacatgtttcacttgttgataaaaaaatatttaaatgaaaatatttcagatgtttcactaccagagaaaatgtttcagtgcttaaacaaaattgtttcaaccaaatgaaaatagtcaaacatactcactgtaacaccaagaaattaatttatgtaacaatgaatcaaaacggaatgaaacaacttaatagaacaaattgcaacaaaaatacaaataagctgcaacatcactaaaattccaacttcactaaaatgaaatgaaacaacttaatagaacaaacaagctacaacatctaaaattccctagcagcgcctacctctatcttcttcaagtccgctcaccggaatcaaccgattggcatggtgtagacgtggtcacgtggaccatggcaagtagcgatgcaggagggcgaccttgccagggcaagtcgcgcgacctccttcgcatcgtgggctcgcggctactctgccgacaccaaaggtccaatgtcttatccggtccttcctttcgtgtcggccttcttcgctgccactagcatggtcgccggtgttctcctccctttttgcgtcgtgccgccccaccaccgccatagttaggggtggacaaaaagctcgggctcgtgagctcggctcgggcttggctcgagctcgcaaagctcggcttggctcgaaaagaaaacgagccgagcccgagctgcctccagagctcgtttgtaaattgagccgagcccgagctagctcacaagccgctcggtaggcttgtcaagctggtgaaaaaatgaccttggcccattaacaattccccatcccaggcctaatgaaaaccctaaccttcccttgctacagaaactattccccttcccacttcccagttcgtcgccgccgctactccatcgcaccgagaccgagtccctccctctgggcggcgcaaggagttgccggccgctggcccgccgcctccctcccagtccctagcagaagcgccggcgcgccgctcgacgcggcagcctcagttccgccagccagccgcctccctcccctgcgccctgcgcggctgcgctggctccggcctccctccccagccgcccagcgacgctcgaccccagtgccgtcgcggcgccgcctctctaccctgcaccgccttcggcctccctctcctgtgctacccgcgtccctgactcgacggtcgacgccgtccatcacctcgccgagacgccaaccgatcgacgacagttcacacagcgacgagcctaggatgaagaggttcgtgatgtattttctgatttttgtgattcatttctcagtagctgtgtatatgcgtgatgaattgatgtgtatatgcgtgatgaattgatgtgtatgtgtgcagtgtgtgctattatcaatgattcaatcacagaaaggttgaggcaaatagatcaaaattgttatacctacactaatatactatacttaattcgagccatatgttttgtgtagtaaatagaatctgtaatgcacacttgctgttaacttgctgaaaattgattgcactattgttgaagtatttacttgctgttgtgcatcacaagctggctcgagctggctcgagctttgaaacgagccaagccgagctgcattttttgctcgttctctttatcaagccgagccgagcctgttctttaccaagctttcacgagccgagccgagcttggctcggcttggctcgtttccacccctagccatagtggccgctggcatgctccttcttcctggcgaaaccacgaacactcgtgttgaggggagagagagaagaatgagtggttgagatagagataagtttgaccggtagagagaaaaaggtgggaaagtggttaggtgggacccactcggtggtgcgtccgatatttcgtcgtatcaaacgttcgatttaaagcattatcggaaatatttgtcatgttttattttcgtggacgaagaaggtggttaatagcgcaggttcatgcacactaactgcacgccgggcttgacggcggtaggagttgcatgcgtactagtctcgtcgttgattagctagcggccaagtctgatcgctcggccgtacatttacactagcaatagaaattacacttacaagtagttgagaatacaaatatacaatgcgctaaattgcattacatttgaaatcggaacgaacttacagagcatactatataattacacgtttgcaaccagagtatatatgctgaacgtacgtcgttgatagtccctaactaattaaggctgacgttgctggtcggtgcaatccggcgagcagcccggcggcggaaggaccgagaagttcgggtgttttgcggatacgggagctgcaaaacaagggaaaaagcaaactgcgtcaatatatcgtcacatgtatttatttattattatgtcgcacaaattaagattaacaaataatctctctttgcttttgaatttatacatttgtgatggtgtttgaatattcatattatcacaaattaaatacagatattaaaattataagttatttatattccttataataaaacaagccacgaggaaattagacgacatttacatatagttcttctaaataagacaaataattaaacgacaagttattcagatatatttgaaaagtaagataatatataagttgatttgctcatgcgcgcaatgggctttgaaatttagcttgagctgcgtataggtgcatgtatatatgatggttaaatgaatctctgatcacctggaggcgactccggtgtccggtcgccgtccggcagaatcggcggcgacgggacgccggcgatcggggtcggcggccggcggcacaagcagccgctggtagccgccaaccagagcaccacggcgagctgcaggagcggcagcacgagacgtcgtcgctgcagccgcgccatccggcctaactagctagctgcctagctaccaccctcttgtaatttgttgctagctgctcaaacgatctgcacgctgctcatatctgataccagcatttcgtgccgggtcattattatttatagaggcaacatggataatcgatattcatagagagcagtggcggacgcaagattaaaataaagatgaggcgaagatgctcgtctcaataagaacaactaaacgcaaaaaataccatatttatgttgtaatcatataaatatatagtataaacaataaattaaggcaaacaaaaacaaaaatgatattaaaaataaagtaataatttttgcgccatacataattcatcatacataaaaagataaacatatcaatttgcaaatatgagtcaattcataaagcatggttgatagatatcttttaaaaaataaatatatgagaagatatcgcatacccagaataagatgattattattttgcttagaagggagagagagagaaaaacattaggcagctaactatagtaggggacgggggtgagcagtgtcgaggaattgactcaggaaagcattacatatgcaggattaaaattggacacttggactgcttatttatgggtcaattgtgaattggatatggtggtaggcggcctaaaaaggatatggagggttggggtggcgcgggccgtagctgggccggccgcccaaccccgcctaatgggtggtaccgcccctgatagagagagaggcgtatagccgtatagtaaaagtcgtatatctgtcgttgtcgtgcgcgaacgcatatggttggtttggtggtactctctcagtctaaaaaaacaaatctaaaactgcacatgacattatactactatatatatatatatatgctacattcagttttagtttcgtttttttttatagtttttccctggttttgcactataaattccagtctacattttgaacggatgcatatatgtgtttcgtatattatatatgttctttatataggtgtttatataggtgttaatgaatttaaataaagaattgtgtgaaaataatacggagaaagtaagaatcaaattttaaaatataccattcattcatttttttttcattaatattcgggatgtaaaattttttacacaaatataccatagtcgctgattgaaagtgcgaaagcaaaacaatatcgctgattcattcagcgaaagtaacgatagcgtgacgatagaccacggtctcacaggttgttggagcgataccgcacggtctcgcaacaccaggacacgggaccagcgtgacagcaaaacaagaagcgatctcgcttgagcagcgtgcgagatggcctgacatggatcatgattaacgtataattaatgattaattaattactaatgatgttaattaaataaaaaataattaattaattaactgctaatgacactaattaatttattactcacacaaatacagtggttatggaaacgaaggagcggtctcacgcactcacagcgcgagaccgagcggtctcgcacacctaccgcgcgagatcgagtaattcgctcagtctcgcacttttattctgcgacaatggtatatttatgtaaattcttcataaacatgtatatttatataaaaccaataaaaaagaggtatatttttaattttttttttcgagaaagtagtaggtactggtatgctgctggtctgcttaatttgacatgtcactcaaaccaccaagggtccatgcaggtctgcacgagtcaaacagaagcggcaactgacttgtctgtccaaggagctctaaatactgtgctgcgtactctacacgtctacgaatatactccctccgttttttaatagatgacgctgttgactttttctcacatgtttgaccattcgtcttattcaaaaaatttatgcaaatgtataagatataaatcacacttaaggtactatgagtgataaaacaactcataacaaaataaattataattacgtaaattttttgaataagacgaatggtcaaacatgtgagaaaaagtcaacggcgtcatctattaaaaaacggaggtagtataaacatctgtagcattggaaatttatagatataagttaattataaacatttttaattacttcgtgctagccaattattcatcttttaatttccattatatatgatttctgccaaccagggatttattaacatgggcagtgaaataattttataccaatcttaatttgcttaagaaatatttgccatgttttatttttgtggacgtagaaggtggttaatagcgacagttggcagttcatgcacggggcttttaactatttgccactcttacggatgttgcttaacgatttgccactagtcccacatgtcatagatatataagggcccacatatcattaacagggtgtgacaaatcgttaattgtgatgtcacatgagtggtggtgaatagttaaatttcccttcatcgacaccaaccgcacgccgggtttgacggcggtaggagctgcaagaatggacacaagccgacaagcgtactagtctcgtcgtcgttgactagctagtggccaagtctgcgattaccctctgctcctagtcctagatcgacaaattaatcgatcattcatgtatgcggagtgtgaaccgggtaatcgtttttttttttttgaactacgggtaatatgagagtatattgtaattaaaacgaaaagaaatttgaatgagtgataggttgataaaaagacaagtatactatgaaatctatctattatatactaaaagtccattaaacttcctacaaacgctctcaatccgccacgtgtcactcctacaaacactcctagaccgtcacatggcactatataatctcaccgtcgattttcacttaaattggtagacccgatattttagaccatttgattagatctattattatttaagaaagtaatcccttcctctactgtgggccagaaaaagaaaaaaaaattataaaaaaaaacgtccgtacttacttacgtgtggcttcgtataaccgtgggccggaaaaagaaaaaaacataagaaagtagtacgctcttcctgtctcttcctcttcctattcttttatatctccatctctttcttatcctaattattttatgttatcaaattaaaaacgagttaagttgaccataatttaaatgtacatagctaatttatattctattaaaacattgctctatttataattaaattgacaattttacatccaatgttttgctatatataagcaatatgttattgtggtatagactgtgcattttgcaagtttgcatgccatctaaataaattaaatacttattaacaacatataatatatctatatatcgatctatctattattatatactaaaagtcgattaaacttcctataaacactcttaagttgccacatgagactcttataaacactcctaagccaccacgtggcactccaataaattagaaaaaatatataacttgaactggtgggccaattggatttatctcataaaaaaatccttcctcaactactaccgtgcgttctcatctccttccccacaatcctttctcctcatctctttcttttttttttctctatggtagttaagatttttgttttattacttaataattaatttcttcacttctatctcacgagaatggccgtggattcttgattgcatgtcccatgcctaaatatataaatgattaatgatctgatgcatgcttttataaataataaatctatttttaactaacaatttagaaaaaagataatagttacatagcaaaataatcataattttaaaaagttactccctctatttcatattataagccattttaacttttttcttaattaaatttctttagatttgaccaaatatataaaaatatttaacaacatctatcacacaaaattgttttgttagatataacgttccatatatatccataatatgttttttttgaaaattttactatattttctataaacttggttaaacttaaaaattcactgaaaaaagtcaaaatgacttataatataaaacggaggtagtatatctgtttttatttagtttgtttgaacggttgtttcataattagacagctaaataatttaaaatcaatattaccaatatttcactataaaaaataaaatatgttatttgaatttccacctattctttacctgacaacccaaataacatcctatttttaatttatttgaattgttgatttatgttactcatattttactatgtaaaatttaaaatacgtaatttgaacatagaccaacaagcaaacaacactgaaacattaaaaaattgacaatatatattatgtcatcttaatcattctacataataaaaattagaaaaatacaaagtcaccatgtatgaccttttagagacatgttaaattaccaagtgtcacatttaaaaaattagtaaaatcttatatattaaaagaaaaaaataaaacatctagctaacggttttcacctagatcgataacctattaacattattttcaactatataatctacttttagaaaaatatatcttaataagtggcatgtcacatcttttaaaaaaaaatcttgcaaatcttaggaaaattacatctaataattggctttcacttaatcacttagaaaaattacaaaaaaaatcccctccacaagcgcccatcactacacacccgctccttcccctctctggctcaagctctacacttttcattcctcttacgttcctatttaactaaaatataaataatctataattataagttttacgtctgatttctaatctaactattgctctgtttataatcaaaccaatgatataagattcatatgcctatagtttactatataacaaatacgacattttaacacaatcagcctattacttacgagtatctcaaatgcaacctacgatacatgcctgcgcgaatgcgcgggctaccttcctagttttataaactgtagttataccggtgcttatattttaaactaggtgtcccgcactttgctgcgggaattactaagcaattttcggtatactttttttttttacaatcgagctagaagtacaaagaaaaaaataatgaaacataagggtttatcaatacttatcataaaacaaaccaatgatacttgagatttaatgggaaaaatattgattagtgtattttaaatattacaaaaatgatagattgatagatttgttaaaatattgtggaaatgatgtgaggggtgatgattagatatacttgcatgttgatttgtagaattaattaaataaatcatagatgatgttgtatgcttgcatgaggtaaatatgtaattattgctagtcggcgatgatgtggcatggttgtatgttgagttttaggagttagctactaggcatcaactttatagtaaaataggattggagtgagccaatggttgtcatattggaacaaaattcaacaaggccaggatcgagattatatatggaccaggaagtgtgggatttctcccgcacctcttgggagagcaaattatacttatatagccaaacgaattgtttgggaagttctataataaaccgttaccaaagaacatcatataggtgtttgttgacagttctataataaactttttgatttgagatattttgatatctgaaaatgtgttataatttctcgggtctatttggataagtgaatttttaaaatttataaacgatctcagatggagacaatctataaaaatcttagatctaggtgagatctataattttgtagttgacaaaattattagttgaactcgagtagaaaattcagtcacatataggataggataagggggagagaacaggagataaaaaaaatatcaggagaggaggggacagagaagaggagatgaaaaattttgaagggaggaggaggagggaaaaaattaatttcaaaatattaaacttcgaatcgaattttatcatactaaatgaactcatgtgaaaaagttgtcaaaaaaagttgtagaactcattgagatctaccaattttattttggtcatttctccatccgagtttgattgaactatataaaatttgaattttaaaatataagaaatttaaataatttttcgggtagtaaatgatttcaaatgggaaagttgtcaacaacaaagtagtatagcttatcaagatctacaacttttgctttggtcatttttctatatgacttactttgaacagtttgaatttgaatttcaaattatgacaacttcaaacaacattttcaaatgttaaatgatttcaactgaaaaaatcatcaacaacaaagttgtataactcatcaatatctctaacttttattttgctcatttattcatccgacaaagtgatagtaacattgttcacaaaatttacatatctcctatatggttttataaactataagagatatatgtagattttttaaacaatgttacaatcactttatcggataaagaaatgaccagaataaaagttatacatattgatgagttatacatatgtagattttgtgaacaatgttacagttactttatcggataaagaaatgaccaaaataaaagttatagatattgatgagttatacaactttgttgttgatgactttttcagttgaaatcatttagtatttgaaaatatttttttgaagttgtcatgattagaatcaaattcaaattattgcaacaaagtcatatagcaaaatgacaaaaacaaaagttgtagatattgatgagttatacaactttattgtttatgattttttcatttgaaaatcatttagtatttgaaaatgttgtttgaagttgtcatattttaaaattcaaattcaaattattgaaataaagtcatataacaaaatcaaaagttgtagatgttgataagttatacaactttattattgacatttttttcatttgaaatcatttactacacgaaaaaaaatttgaattgagaggagggaggcaaatagtcttctcgacgagggaggagcaaaagggttgggccgacggcccgaagagggaggagtggaaggggaagccggcccgaggagggagaaagaagctgcgggctgagggagggagagagtaatacttgggccgaaaaagccccaaggacaaagagagggattttaatttgttttctatttattttaataggttaaatgaacttggtggtattaaaattagttattgagcttcgaaaattcatggaaatttttagagaataatttagaccacgtagaatattacaaaaatatttgtggccatgattttaaaggaaaattttagtttctttattaattcacttgattaaattgcttcaatttttaatatatttttttctagaaatacattatataaatctgtgatgttttctttttgactcttatgacaaattaatattcgtcacaatgtctcatcgaaatattttatgatgattttgtcagggtgatggataccacatacctaatagtagttgactaaatctcggcagaacccatcacataccatgttttatatggaaacaaccttaggatataggaggagttccgcataaggtaggatgactagagttttacatggaaacgacaaaaactactcgaattgtatccatattggttttcctagttctacttagacaaggggacatctacgggtataaatacaaggccccctaggaggagaggggacacagaacaatagatcaatacacaagatcaacatacaagccaacatacgccaagacaagacgccggatatcgacttcagagataggcatggctagtcccctatagtgcctatagccaccatcaggagagatatagcgctgtctctgatctcgccggatgcggattcgagaaggaaggctaccctgttgtcgactacgagtcagactttcagaccgccatgtcgacaacagttagataggcttaccctaaatattgtactggtgtgattatggtgaataagagcaataccggcttcggccaacagaatatagagttattacctgacaattcaggagcctgaacctgtataaaaatctctgtctccatctcttttacctcaatctcgcatataccctggtaccaacgattcccatactatgcaaataccggaatcgcgacatcaaacgtcgacagatttctagttggtattaacgacgaacactttttttttgtcactaagccacccatctcatattaattgtcataaaatggaatgtgataatgacgaatagctccgacgttacaaggaattcgtcacagaaggtcatatttcttgtagtgctcgtcggcattggcggcagatccggcctcccctgtcatcgcggcggtggatccagccacccccgtcgtcgcggcagcggatccggtcttccccgtcaacgcggcggccggatctggcctcgagctcgcggcggagaggcgacggcagcctgtggcatatcttgtagcaccatatgttgagttccatttggttcgatgtttgatgtcgcaattccggtatttgcatagtatgaggatcgttggtaccaggatatatgtgagattgaggtaaaagagacggagacgaggatttttatacaggttcgggcccctgaattgtcaggtaataaccctacatcctgttggccgaagccggtcattgctcttatgtcacgcctggaaatatacaccatttccaaacgctcagtgcattaatcctcgtcccaggaggcgaggtacacatagacattgttgtttattacatgccacacttgcggaaacgtaaaggagtactttattacatgggcgacttaggccctcacactcaaagataaacaaataaaacagcggaagactacggaacagcagcagccacaggcactcgacggcggagcgaactagagatcaaagccttcaccttcctcaggtccatcctctggattatttttgtgagcaagagtgagtaccaccaccgtactcagcaagtcacaccggaaatgcaacaataatgcgtagggaaaacaagaaaatggcctaatagggtttattttgcataaagccataatttaaacattttaatcaagttaaagctcattttaaaacacgatcctgttctaagccaatattttaatatcatcaaggtcgcatgagcctacgaacctgccttaacccaggctaatcttcacatgactacaccatcatgatttcaccctcccaaggttttataaaacaaaactaactttgggtacattgcttagcttgcccataaccgaggacgcggctatttgaatagttctaactctgatcagaggtgtacaactttacccacaatacccaacctcaacacgcgttgccacgcgccaggtaccaccacggtactcggatagaggtcgtgacaagactatccatctaggtctacccaaaacaggagaacccgctgtggtttccctgcccgccggtccccgacaaggtaaaggttgccggatcccccaggacgagacaggcccccccttgcgccgggttaaaaacggccttaatcctggcctcacacccttccaaccaatggtctctgttttgagaagatctaaatttccagtcaggccttacccacaagacttgtggttgcacgaagatgccttgcaacagaggcccgaagaccgatccttatattagccggggtgcgactaccaaagtaactagcttgcaccccaagcccagcccaaaaatatattttagttgcacaaatcattttatcacccatctattgacaaaccagtcaatagtccataactaatccaattttagttgttaaccaccaaagtctagtttaaccaaaagttctaggttggaactaagcatgactaagcatttacctaaagcaactagtcagtccatcatgtagggtaccagactagtcaagttataattttactaggtttcacaacgatcatggatatcaaatcaataacatggccataacaaagagcataggaataactaataaaacaatattaataatgaacggtataatttataaagcagtgcaatataagtaaaacaacataattttcacaatatgggattcaacatgttcaaggtagatatgacttgccttgatcgctcacaaagtcttcggcgtcaacggcgatgaaaagctgatcttccggaacggcgggatctacacgaccaacgcgaagaaaaacaaaaaggctaataaaaaccatatgaacagaagcaataaagcacataaatgggttctactcatttttaggagaaattagagatttgaacgggtcgattctgagttcaaacggtcaagatatggccatttgaagtttatgtgctgtttaaatggaaatttgcaattttatgaattatttttctaaaggaaattgatttattgcacagagaagagagagaggggtccatgggcgggtcccacttggcagccgctcggtacaccatgagggcggctcacggcgcacaagcacgcccgggaaggagaagcacccgagccaggcggcacgccggcgacggccaacggcgcggcgacggtgcgacggagtacgggaaggggaaaaacggaaaggggaggagacgacggttctcaccgagcagacacggcggcgagaggtcgacggtgttgccggcggtgaggaagaaacggcgagaagcttcgggtcgtcggcgtcggcgtcgttcccgcggtccttgtactcgacggaggggtggacggggaagaggaggaagcgacgaagcggatggtggcgacgccgggctccgatgagtctcgaccaccggcgaggggcggccggagttgcgacggcggcgacacaagaagagagcggcgcggcggccgcggagagaggagggagagggcggcggtgtgaggggagagaggagggagtcgggggtcccttttataggccggaggggagggagagagacgccggggagggagatcgacgccggccatggtggagctcgccattaaagaacatcatcaaaatccaccacgaataatgcgggattgagtgggaaattatgggggaattggagaggatgaggtgggaattaatttccctcaattaatttgatgaaacggcgagtggaggaggtgaatcggaggttgccgtcgcttggaattcggccggagagagaggggatggctggaggttagcgatgacgagtgggacccacctgtcatcgagtaggagcacgcctgtctcaggctgggcgcgcaggggaagtgaagcagacttttgtccgagggagggggggagcagttggttcagcccaaggagagggagggggagaggagagagggaggggtggccgggctgggctgagggaaggagggggagagatgggctagaagtggcccaagaggaggaagaggatttcttttagcttttcctttttataaaattctttaattgttttgttgccttataattatttagaatgctctgaaaattcaagtgaaaattggttaaacatttttaagcatggggaatttattaaaaatactcacaagccaatttgatataaatctttggtgaattttaattgttggaggctcttttaggcttttaaaatttctagaaatacattaaagcacgatttaaatttagggcgattttcagggcgttacatcttattcaccataatcacaccagtacaatatttggggtagcctatctaattgttgtcgacatagcggtctgaaggtctgacacgtagtcgacaacatggtagccttcttcctcgaatccgcatctggcgagatcagatacagcgctatatctctcctgacggtagccataggcaccatatgggactagtcatgcatatctctgaagtcgatatttgacgtcttatcttagcgtatgttggcttgtatgttgtggcttctgttgtcccgtgtcttctgtattgggtgtcctcttctcctagggggccttctatttatacccataggtgtcctctttccaagtagaactagggaaaccaatatggatacaatctgagtagtcattgtcgtttccatgtagaactctggttgtctttccttattcggatctccctccatatccgaggtcagtttccatatataacatggtatgtggtgggtcctgccgagatgtagtcgactattattaggtatgtggtatccatagccctgacaagtacgaataaaagggtgttgctaagaaagatggtttctattgtagtgacggtaacaaaatacatatgaaacttgattgaatactcgattaatccacgacaatatatatcaggataacacactgacacagcgacaaccggttcttttttcatttagacgcaaatttcaccttggtttctgttagcacacatttcaaactactaaatggcatgtttcgtgtgaactttttatatagaagttgctataaaatatcaaataaattcatttttcaaatttgcaataattaaaactcaattaatcatatgctactagttttttgtttttatgcccttacttaatattcattttcattagtatcaaacaccagtcaagtccctcgcaaaccgtagccctgctcaatcaactcccccgcatatctgcttacatcacccacgtcgagtggcctaggagatccgtgcggtgcacctcgctggtgatggcgctgctagcacgactgccatggggcctgcgatagcgatggtgtgtgagaagggtaaccaagtgaaagactgtaatctgcagttgcagtggcggacaagttctacttggccgaagctgtctcgacataagttgtcgtacactcttgtcactcgcactcctgcacaattttagcttccatttatctatttctttatggtgaaatcccgtggatctatctaatgattttatttgaatggattagggtccaatttgctgacaaattaaagttctttcaccttcatgctcaagttgagaatttcggaatggtccagttgcaggctctgtcggtctgtactacccggtctctctacactcatcgcacagatatgaccaacaaaggaccatatgaggaacaaccggaaaaaacatcctagatttcttaagcagataaa
